(19) United States
(12) Patent Application Publication
(10) Pub. No.: US 2024/0360474 A1
(43) Pub. Date: Oct. 31, 2024

(54) SELF-INACTIVATING VECTORS FOR GENE EDITING

(71) Applicant: Scribe Therapeutics Inc., Alameda, CA (US)

(72) Inventors: Katherine BANEY, Berkeley, CA (US); Isabel COLIN, Oakland, CA (US); Cécile FORTUNY, Oakland, CA (US); Sean HIGGINS, Alameda, CA (US); Suraj MAKHIJA, San Francisco, CA (US); Brett T. STAAHL, Tiburon, CA (US); Maroof ADIL, Davis, CA (US); Benjamin OAKES, El Cerrito, CA (US); Addison WRIGHT, El Cerrito, CA (US); Angus SIDORE, Oakland, CA (US); Manuel MOHR, Berkeley, CA (US); Sarah DENNY, San Francisco, CA (US)

(21) Appl. No.: 18/608,127

(22) Filed: Mar. 18, 2024

Related U.S. Application Data
(63) Continuation of application No. PCT/US2022/076980, filed on Sep. 23, 2022.
(60) Provisional application No. 63/349,025, filed on Jun. 3, 2022.
(60) Provisional application No. 63/247,573, filed on Sep. 23, 2021.

(51) Int. Cl. C12N 15/86; C12N 9/22; C12N 15/11

(52) U.S. Cl. CPC C12N 15/86; C12N 9/22; C12N 15/111; C07K 2319/09; C12N 2310/14; C12N 2310/20; C12N 2310/531; C12N 2750/14122; C12N 2750/14123; C12N 2750/14143; C12N 2750/14152

(57) ABSTRACT

Provided herein are compositions and methods for use of self-inactivating recombinant vectors (SIRV) encoding Class 2 Type V and guide ribonucleic acid (gRNA) sequences useful for nucleic acid sequence editing, and including self-inactivating components. The SIRV may be delivered to cells as part of an AAV vector to target a gene of interest.

### CROSS REFERENCE TO RELATED APPLICATIONS

[0001] This application claims priority to U.S. provisional patent application Nos. 63/247,573, filed Sep. 23, 2021, and 64/349,025, filed Jun. 3, 2022, the contents of which are incorporated herein by reference in their entirety.

### INCORPORATION BY REFERENCE OF SEQUENCE LISTING

[0002] This application contains an electronic sequence listing. The contents of the electronic sequence listing (SCRB_033_02WO_SeqList_ST26.xml; Size: 3,874,654 bytes; and Date of Creation: Sep. 20, 2022) are herein incorporated by reference in their entirety.

### BACKGROUND

[0003] Gene editing holds great promise for treating or preventing many genetic diseases. However, safe and targeted delivery of CRISPR gene editing machinery into the desired cells is necessary to achieve therapeutic benefit. Use of viral vectors, such as adeno-associated viral (AAV) vectors, have shown promise in the delivery of CRISPR components into cells for editing of target nucleic acids, particularly with the choice of the proper serotype (Kotterman M A, et al. Viral Vectors for Gene Therapy: Translational and Clinical Outlook. Annu. Rev. Biomed. Eng. 17:63-89 (2015)). However, the long-term expression of CRISPR nucleases mediated by AAV in the post-mitotic cells raises concerns with specificity, immunogenicity and safety. Thus, there remains a need in the art for compositions and methods for delivering CRISPR gene editing machinery to cells that are self-inactivating after the desired on-target editing of a nucleic acid in the cell takes place.

### SUMMARY

[0004] The present disclosure relates to self-inactivating recombinant vectors (SIRV) and self-inactivating adeno-associated virus (siAAV) vectors for the delivery of CRISPR nucleases and guide RNAs to cells for the modification of target nucleic acids. The SIRV disclosed herein can temporally control the expression of one or more of the CRISPR components relative to editing or modification of the target nucleic acid.

[0005] As provided herein, self-inactivating recombinant vectors (SIRV) express guide RNAs and Class 2 Type V CRISPR nucleases having a single RNA-guided RuvC domain for genetic editing of a target nucleic acid in target cells and/or tissues, wherein the expression of one or more of the CRISPR components is diminished or eliminated by the self-editing components following editing of the target nucleic acid. The timing of diminishing or eliminating the expression of the one or more CRISPR components relative to editing the target nucleic acid is controlled by the design of the SIRV. A number of design approaches to effect the self-inactivating feature of the constructs are disclosed herein. These approaches and their features can also be used in combination.

[0006] The self-inactivating features of the SIRV disclosed herein, when incorporated into a viral vector (e.g., an siAAV) or lipid nanoparticle, confer enhanced safety and a higher degree of specificity to the compositions when utilized for gene editing in a subject compared to systems not employing the self-inactivating features. As described herein, the cleavage of self-inactivating segments (in double-stranded episomal form in cells transduced by the siAAV) by RNPs of the CRISPR nuclease and guide RNA results in reduced or eliminated expression of one of more components of the transgene. As a result of the self-inactivating properties, the SIRV and siAAV have an enhanced safety profile when used to modify a target nucleic acid in a population of cells of a subject.

[0007] In another aspect, the disclosure relates to polynucleotide compositions that are designed to prevent the premature degradation of the components encoded by the transgene of the siAAV in a packaging cell during the production of the SIRV and siAAV.

[0008] The present disclosure also provides methods for treating a subject having an underlying disorder or disease with the SIRV and siAAV compositions.

### INCORPORATION BY REFERENCE

[0009] All publications, patents, and patent applications mentioned in this specification are herein incorporated by reference to the same extent as if each individual publication, patent, or patent application was specifically and individually indicated to be incorporated by reference.

### BRIEF DESCRIPTION OF THE DRAWINGS

[0010] The patent or application file contains at least one drawing executed in color. Copies of this patent or patent application publication with color drawing(s) will be provided by the Office upon request and payment of the necessary fee.

[0011] The novel features of the disclosure are set forth with particularity in the appended claims. A better understanding of the features and advantages of the present disclosure will be obtained by reference to the following detailed description that sets forth illustrative embodiments, in which the principles of the disclosure are utilized, and the accompanying drawings of which:

[0012] FIG. 1 shows a schematic of the AAV construct described in Example 1.

[0013] FIG. 2 is a graph showing results of an editing assay using AAV transgene plasmids nucleofected into mouse neural progenitor cells (mNPCs), as described in Example 1, demonstrating that the CasX and targeting guide in three different vectors (constructs AAV1, AAV2, and AAV3) edits on target (tdTomato) with high efficiency compared to non-targeting control (NT). Editing was assessed by fluorescence activated cell sorting (FACS) 5 days post-transfection. Data are presented as mean±SEM for n=3 replicates. % dtTom: percent of mNPCs expressing tdTomato, as assessed by FACS.

[0014] FIG. 3 is a graph showing results of an editing assay using AAV transgene plasmids nucleofected into mNPCs at four different dose levels, as described in Example 1. CasX delivered as an AAV transgene plasmid to mNPCs edited on target with high efficiency in a dose-dependent manner, compared to a non-targeting control (NT). CasX variant 491 with scaffold variant 174 (SEQ ID NO: 2238) and a spacer targeting tdTomato in three different vectors (constructs AAV1, AAV2, and AAV3) were nucleofected in mNPCs, and editing was assessed by FACS 5 days post-transfection. Data are presented as mean±SEM for n=3 replicates.

[0015] FIG. 4 is a graph showing results of an editing assay using AAV vector construct 3 transduced into mNPCs at 3-fold dilutions, and assessed by FACS five days post-transduction, as described in Example 1. Data are presented as mean±SEM for n=3 replicates. MOI: multiplicity of infection.

[0016] FIG. 5 is a scanning transmission micrograph showing AAV particles with packaged CasX variant 438, gRNA scaffold 174 and spacer 12.7, as described in Example 2. AAV were negatively stained with 1% uranyl acetate. Empty particles are identified by a dark electron dense circle at the center of the capsid.

[0017] FIG. 6 shows results of immunohistochemistry staining of mouse coronal brain sections, as described in Example 3. Mice received an intracerebroventricular (ICV) injection of 1×10¹¹ AAV packaged with CasX 491, and gRNA scaffold 174 with spacer 12.7 (top panel), which were able to edit the tdTom locus in the Ai9 mice (edited cells appear white). The bottom panel shows that CasX 491 and scaffold 174 with a non-targeting spacer administered as an AAV ICV injection did not edit at the tdTom locus. Tissues were processed for immunohistochemical analysis 1 month post-injection.

[0018] FIG. 7A shows results of an immunohistochemistry staining of a mouse liver section showing that CasX 491 and scaffold 174 with spacer 12.7 administered as an AAV IV injection was able to edit the tdTom locus in vivo in Ai9 mice, as described in Example 3.

[0019] FIG. 7B shows results of an immunohistochemistry staining of a mouse heart section showing that CasX 491 and scaffold 174 with spacer 12.7 administered as an AAV IV injection was able to edit the tdTom locus in vivo in Ai9 mice, as described in Example 3. The images are representative of n=3 animals.

[0020] FIG. 8 is a graph showing the results of an editing assay of the tdTom locus in mNPCs using AAV transgene plasmids of constructs having variations in the CasX promoters, as described in Example 4. Editing was assessed by FACS 5 days post-transfection. Data are presented as mean±SEM for n=3 replicates.

[0021] FIG. 9 is a graph showing the results of an editing assay of the tdTom locus in mNPCs using AAV transgene plasmids of constructs having variations in the CasX promoters, as described in Example 4. Editing was assessed by FACS 5 days post-transfection. Data are presented as mean±SEM for n=3 replicates.

[0022] FIG. 10 is a plot and a table that show the results of an editing assay of the tdTom locus in mNPCs using AAV transgene plasmids of constructs having variations in the CasX promoters and transgene size (see table, bottom), as described in Example 4. Editing was assessed by FACS 5 days post-transfection. Data are presented as mean±SEM for n=3 replicates.

[0023] FIG. 11 is a pair of graphs that show the results of an editing assay of the tdTom locus in mNPCs using AAV vectors incorporating the same promoters as shown in FIG. 10, as described in Example 4. The graph on the left shows results testing 3-fold dilutions of the constructs, while the graph on the right shows results of editing using an MOI of 2×10⁵ vg/cell. Editing was assessed by FACS 5 days post-transfection. Data are presented as mean±SEM for n=3 replicates.

[0024] FIG. 12 is a graph showing the results of an editing assay of the tdTom locus in mNPCs using AAV vectors with protein promoter variants designed to reduce transgene size, compared to AAV with the top 4 protein promoter variants identified previously (AAV.3, AAV.4, AAV.5 and AAV.6), as described in Example 4. Editing was assessed by FACS 5 days post-transfection. Data are presented as mean±SEM for n=3 replicates. The dashed line shows editing levels of AAV.4, the AAV construct that in this experiment was used as a baseline for comparison across the variants.

[0025] FIG. 13 is a graph of percent editing versus transgene size (from ITR to ITR, in bp) for all constructs having the varying promoters tested in Example 4. Constructs circled with dashes were identified as having above average editing while minimizing transgene size. The dashed line shows editing levels of AAV.4, the AAV construct that in this experiment was used as a baseline for comparison across variants.

[0026] FIG. 14 is a graph showing the results of an editing assay of mNPCs using AAV transgene plasmids having variations in gRNA promoter strength, as described in Example 5. Editing was assessed by FACS 5 days post-transfection. Data are presented as mean±SEM for n=3 replicates.

[0027] FIG. 15 is a pair of graphs that show the results of an editing assay of mNPCs using three different AAV vectors having variations in gRNA promoter strength, as described in Example 5. The graph on the left shows results testing 3-fold dilutions of the constructs ranging from 1×10⁴ to 5×10⁵ vg/cell, while the graph on the right shows results of editing using an MOI of 3×10⁵ vg/cell. Editing was assessed by FACS 5 days post-transfection. Data are presented as mean±SEM for n=3 replicates.

[0028] FIG. 16 is a bar graph that shows percent editing of the tdTom locus in mNPCs in an experiment to assess use of truncated U6 RNA promoters in constructs when delivered in AAV transgene plasmids designed to minimize the footprint of the Pol III promoter in the delivered transgene, as described in Example 5. Editing was assessed by FACS 5 days post-transfection. Data are presented as mean±SEM for n=3 replicates.

[0029] FIG. 17 is a bar graph that shows percent editing of the tdTom locus in mNPCs comparing base construct AAV53 to construct AAV85, when delivered as AAV vector designed to minimize the footprint of the Pol III promoter in the delivered transgene, as described in Example 5.

[0030] FIG. 18 is a bar graph that shows editing results of the tdTom locus in an experiment to assess the effects of constructs having engineered U6 RNA promoters when delivered to mNPCs in an AAV vector designed to minimize the footprint of the Pol III promoter in the AAV transgene, as described in Example 5. Editing was assessed by FACS 5 days post-transfection. Data are presented as mean±SEM for n=3 replicates.

[0031] FIG. 19 is a scatter plot depicting transgene size (from ITR to ITR, in bp) of all AAV variants tested having engineered U6 RNA promoters on the X-axis vs. percent of mNPCs edited on the Y-axis, as described in Example 5. The dashed line indicates construct AAV53, the construct which had the largest promoter tested, while the dotted line indicates construct AAV89, the construct which had the smallest promoter tested.

[0032] FIG. 20 is a graph showing the results of an editing assay of the tdTom locus in mNPCs in an experiment to assess the effects of constructs having engineered Pol III RNA promoters when delivered in an AAV vector designed to minimize the footprint of the Pol III promoter in the AAV transgene, as described in Example 5. Editing was assessed by FACS 5 days post-transfection. Data are presented as mean±SEM for n=3 replicates.

[0033] FIG. 21 is a bar graph showing AAV-mediated editing level in mNPCs at an MOI of 3.0E+5 vg/cell using the indicated constructs, as described in Example 5.

[0034] FIG. 22 is a bar graph showing editing results of the tdTomato locus in an experiment to assess the effects of AAV constructs having engineered Pol III promoter hybrid variants when delivered to mNPCs in an AAV vector, as described in Example 5. Editing was assessed by FACS five days post-nucleofection.

[0035] FIG. 23 is a scatter plot depicting the transgene size (from ITR to ITR, in bp) of all variants tested on the X-axis vs. the percent of mNPCs edited on the Y-axis, as described in Example 5.

[0036] FIG. 24 is a graph showing the results of an editing assay of the tdTom locus in mNPCs using AAV transgene plasmids having variations in poly(A) signals, as described in Example 6. Data are presented as mean±SEM for n=3 replicates.

[0037] FIG. 25 is a graph showing the results of an editing assay of the tdTom locus in mNPCs using two AAV vectors having the high-performing poly(A) signals, as described in Example 6. Editing was assessed by FACS 5 days post-transfection. Data are presented as mean±SEM for n=3 replicates.

[0038] FIG. 26 is a diagram depicting schematics of AAV plasmid constructs containing guide RNA transcriptional units (gRNA scaffold-spacer driven by a U6 promoter) in different orientations in regard to the protein promoter transcriptional unit, as described in Example 7. The tapered points depict the orientation of the transcriptional unit for protein or guide RNA.

[0039] FIG. 27 is a graph showing the results of an editing assay of the tdTom locus in mNPCs using AAV transgene plasmids having differences in regulatory element orientation, as described in Example 7. Editing was assessed by FACS 5 days post-transfection. Data are presented as mean±SEM for n=3 replicates.

[0040] FIG. 28 is a graph showing the results of an editing assay of NPCs using AAV vectors containing guide RNA transcriptional units (gRNA scaffold-spacer driven by a U6 promoter) in different orientations in regard to the protein promoter transcriptional unit, as described in Example 7. The graph on the left shows results testing 3-fold dilutions of the constructs depicted in FIG. 26 ranging from 1×10⁴ to 2×10⁶ vg/cell. The bar graph on the right shows AAV-mediated percent editing in mNPCs at an MOI of 3.0E+5 vg/cell. Editing was assessed by FACS 5 days post-transfection. Data are presented as mean±SEM for n=3 replicates.

[0041] FIG. 29 is a bar graph of results of an editing assay of the tdTom locus in mNPCs using AAV transgene plasmid constructs having different post-transcriptional regulatory elements, and as compared to constructs not having post-transcriptional regulatory elements, as described in Example 8. Editing was assessed by FACS 5 days post-transfection. Data are presented as mean±SEM for n=3 replicates.

[0042] FIG. 30 is bar graph showing AAV-mediated editing levels (grey bars) of mNPCs at a viral MOI of 3.0E+5 compared to nucleofection-mediated editing using 150 ng of AAV-cis plasmids (dark bars) expressing the CasX protein 491 under the control of select promoters without (constructs AAV4, AAV5, AAV6) or in combination with different post-transcriptional regulatory element sequences (constructs AAV35-AAV37 for base plasmid 4, constructs AAV38-AAV39 for base plasmid 5, and constructs AAV42-AAV43 for base plasmid 6), as described in Example 8. Editing was assessed by FACS 5 days post-transfection. Data are presented as mean±SEM for n=3 replicates.

[0043] FIG. 31 is a bar graph showing AAV-mediated editing levels of mNPCs at a viral MOI of 3.0E+5 for constructs under promoters without (constructs AAV58, AAV59, AAV53) or in combination with different post-transcriptional regulatory element sequences (respectively constructs AAV72-AAV74 for base plasmid 58 containing Jet promoter, constructs AAV75-AAV77 for base plasmid 59 containing Jet+USP promoter, and constructs AAV80 and AAV81 for base plasmid 53 containing UbC promoter), as described in Example 8. Editing was assessed by FACS 5 days post-transfection. Data (n=3) are presented as mean±SEM.

[0044] FIG. 32 is a scatterplot comparing the transgene size of each construct evaluated (from ITR to ITR, in bp) to AAV-mediated editing levels in mNPCs at a MOI of 3.0e+5 vg/cell, as described in Example 8. The circled data points represent the constructs identified with the highest editing levels of select transgene size. The horizontal grey line shows the editing level of the benchmark vector AAV.53 for comparative purposes. The vertical grey line delimits vectors that are over or under a 4.9 kb transgene size.

[0045] FIG. 33 is a violin plot displaying fold-improvement in AAV-mediated editing from the inclusion of the indicated posttranscriptional regulatory element (PTRE) in the transgene plasmid, relative to a transgene with same promoter but no PTRE, indicated by gray dashed line, as described in Example 8.

[0046] FIG. 34 is a bar chart showing editing results of constructs with different neuronal enhancers delivered as AAV transgene plasmids to mNPCs, as described in Example 8. The gray lines show editing levels of reference plasmid 64, harboring a CMV enhancer and a core promoter. Editing was assessed by FACS 5 days post-transfection. Data are presented as mean±SEM for n=3 replicates.

[0047] FIG. 35 shows the schematics of AAV constructs with alternative gRNA configurations for constructs having two gRNAs, as described in Example 9. The top schematic is architecture 1, while the bottom is architecture 2. The tapered points depict the orientation of the transcriptional unit for CasX protein or gRNA.

[0048] FIG. 36 shows the schematics of AAV constructs with additional alternative gRNA configurations for constructs having two gRNAs, as described in Example 9. The tapered points depict the orientation of the transcriptional unit for CasX protein or gRNA.

[0049] FIG. 37 shows the schematics of gRNA stack (Pol III promoter, scaffold, spacer) architectures tested with nucleofection and AAV transduction, as described in Example 9. The AAV transgene harbors dual stacks in different orientations, with spacer 12.7, 12.2 and non-targeting (NT) spacer. The tapered points depict the orientation of the transcriptional unit for CasX protein or gRNA.

[0050] FIG. 38 is a graph showing the results of an editing assay for AAV constructs having gRNA stacks delivered via plasmid transfection to mNPCs at the two indicated doses, showing constructs with RNA stacks edit with enhanced potency compared to non-targeting control (NT), as described in Example 9. Editing was assessed by FACS 5 days post-transfection. Data are presented as mean±SEM for n=3 replicates.

[0051] FIG. 39 is a graph showing the results of an editing assay of mNPCs using AAV transgene plasmid constructs having two gRNAs in different architectures and with different combinations of spacers (see FIG. 35) compared to construct 3 having a single gRNA and to a non-targeting control, as described in Example 9. Editing was assessed by FACS 5 days post-transfection. Data are presented as mean±SEM for n=3 replicates.

[0052] FIG. 40 is a graph showing the results of an editing assay of mNPCs using AAV vector constructs 45-48 having two gRNAs in different architectures and with different combinations of spacers (see FIG. 35) compared to construct 3, as described in Example 9. The left panel shows editing results using 3-fold MOI dilutions ranging from 1×10⁴ to 3×10⁵ vg/cell, while the right panel shows editing results at an MOI of 3×10⁵ vg/cell. Editing was assessed by FACS 5 days post-transduction. Data are presented as mean±SEM for n=3 replicates.

[0053] FIG. 41 is a bar graph showing percent editing in mNPCs using AAV transgene plasmid constructs with varying 5′ NLS combinations, and with 3′ NLS 1, 8 and 9 in mNPCs, as described in Example 10.

[0054] FIG. 42 is a bar graph showing percent editing in mNPCs using AAV vectors with varying 5′ NLS combinations with 3′ NLS in mNPCs, as described in Example 10.

[0055] FIG. 43 is a bar graph showing percent editing in mNPCs using AAV vectors with varying NLS combinations, when delivered in a vector also designed to minimize the footprint of Pol III promoter in the transgene, as described in Example 10.

[0056] FIG. 44 is a schematic of a self-inactivating recombinant vector (SIRV) transgene design in which the PAM sequence of the self-limiting segment (white box in the schematic) is varied relative to the PAM sequence of the target nucleic acid, as described in Example 12. Within the top boxes, the first nucleotide ‘T’ of the illustrated PAM motif can be swapped with alternative nucleotides A, C, and G to obtain alternative PAM motifs. The black triangle in the top boxes indicates that PAM sequences have “strength” in the order of TTC>ATC>CTC>GTC. The sequence in the top boxes has SEQ ID NO: 4157.

[0057] FIG. 45 is a schematic of a SIRV transgene design in which differences in the nucleotides of the self-limiting segment compared to corresponding positions in the targeting sequence of the gRNA are introduced (arrows pointing to certain “N” positions in the boxes on top of the schematic) to reduce the binding affinity of the gRNA to the self-limiting segment compared to the target nucleic acid. The sequence in the white boxes corresponds to SEQ ID NO: 4157.

[0058] FIG. 46 is a schematic of a SIRV transgene design in which a second gRNA is incorporated into the transgene (black box in the schematic) that targets the self-limiting segment while the first gRNA (white box at right side of the schematic) targets the target nucleic acid, as described in Example 14. In this design, the second gRNA is “weaker” and is less efficient in promoting editing compared to the first gRNA. The sequence in the top boxes corresponds to SEQ ID NO: 4157.

[0059] FIG. 47 is a schematic of a SIRV transgene design in which a second gRNA is incorporated into the transgene (black box in the schematic) that targets the self-limiting segment while the first gRNA (white box at right side of the schematic) targets the target nucleic acid, as described in Example 13. In this design, the second gRNA is under the control of a “weaker” promoter such that transcription is delayed or reduced compared to the transcription of the first gRNA under the control of a “stronger” promoter. The sequence in the top boxes corresponds to SEQ ID NO: 4157.

[0060] FIG. 48 is a bar plot of editing efficiency in a PASS assay using CasX 491 protein at four different PAM sequences (TTC, ATC, CTC and GTC), as described in Example 12. Results are presented as the mean and SEM for duplicate samples.

[0061] FIG. 49A is a bar graph displaying viral titer yield from production of the indicated AAV vector constructs with 5 different PAM sequences (TTC, CTC, ATC, GTC and GGGG, in AAV. 24, 25, 26, 27, 28 respectively), as described in Example 12. Vector AAV.31 does not contain a self-targeting sequence.

[0062] FIG. 49B is a bar-graph showing the fold-change in titer results normalized to that of the control AAV.31 (value of 1.0), as described in Example 12.

[0063] FIG. 50A is a bar graph displaying levels of editing (indels) detected in the ssDNA of AAV vectors of the same constructs shown in FIG. 49A, as described in Example 12.

[0064] FIG. 50B is a bar graph showing NGS analysis of indel rates performed on different viral fractions during AAV production (production run 1=AAVX column purified, buffer exchanged fraction versus production run 2, production run 3=crude lysate AAV fractions post cell lysis), as described in Example 12. AAV.25 and AAV.27 contained targeted self-limiting segments while AAV.28 contained a non-targeted segment as a negative control.

[0065] FIG. 51 is a graph showing the results of editing levels mediated by AAV transgene plasmids 31, 72 and 73 nucleofected into mNPCs at doses of 250 ng and 125 ng, as described in Example 13.

[0066] FIG. 52A is a graph of percent editing levels mediated by AAVs 31, 72 and 73 (the X in AAV.X indicates the corresponding cis plasmid #) using 3-fold serial dilution MOIs in mNPCs infected at 4 MOIs ranging from 1.e+4 to 5.0E+5 viral genome/cell. A gRNA scaffold variant targeting the Rosa-tdT locus was under the control of a different RNA promoter, as described in Example 13. Data (n=3) are presented as mean±SEM.

[0067] FIG. 52B is a bar graph showing AAV-mediated editing level in mNPCs at an MOI of 3.0E+5 vg/cell comparing the three constructs (AAVs 31, 72 and 73), as described in Example 13.

[0068] FIG. 53 is a graph showing the results of an editing assay that assessed the effects of truncated Pol III RNA promoters when delivered in an AAV vector designed to minimize the size of the promoter in the delivered transgene, as described in Example 13. Data are presented as mean±SEM for n=3 replicates.

[0069] FIG. 54 is a graph showing the results of an editing assay comparing two constructs delivered in AAV, as described in Example 13.

[0070] FIG. 55 is a graph showing the results of an editing assay of the indicated constructs delivered by nucleofection to mNPCs, assessing engineered Pol III RNA promoters designed to minimize the size of the Pol III promoter in the AAV transgene, as described in Example 13. Data are presented as mean±SEM for n=3 replicates.

[0071] FIG. 56A is a graph showing editing levels mediated by AAVs (in AAV.X, the X indicates the AAV-cis plasmid number) delivered to mNPCs using 3-fold serial dilution MOIs ranging from 1.e+4 to 5.0E+6 to viral genome/cell, as described in Example 13. Data (n=3) are presented as mean±SD (standard deviation).

[0072] FIG. 56B is a bar graph showing AAV-mediated editing level in mNPCs at MOI of 3.0E+5 vg/cell, as described in Example 13.

[0073] FIG. 57 is a scatter plot depicting transgene size of the indicated constructs tested on the X-axis vs. percent of NPCs edited on the Y-axis, as described in Example 13.

[0074] FIG. 58 is a schematic showing inclusion of a second gRNA (black box between the two Pol III promoters) to target a sequence specific to the transgene (black portions flanking and internal to the box labeled CasX), separate from the therapeutic target sequence, which is targeted by the first gRNA (white box at the right side of the schematic), as described in Example 14. The sequence in the white boxes corresponds to SEQ ID NO: 4157.

[0075] FIG. 59 a schematic of different gRNA architectures tested with nucleofection and AAV transduction. In each case, the gRNA scaffold-spacer unit is driven by a U6 Pol III promoter. The transgenes harbor dual gRNAs driven by Pol III in different orientations, with spacer 12.7, 12.2 and non-target spacer NT. The tapered boxes for the protein promoter and Pol III promoters depict orientation of transcription (transcription occurs in the direction of the tapered point).

[0076] FIG. 60A is a graph showing editing levels in mNPC cells mediated by AAVs (the X in AAV.X indicates the corresponding AAV-cis plasmid #) delivering dual guide systems at 3-fold serial dilution MOIs, ranging from 1.e+4 to 3.0E+5 viral genome/cell, as described in Example 14. Editing was assessed by FACS 5 days post-transfection. Data (n=3) are presented as mean±SD.

[0077] FIG. 60B is a bar graph showing AAV-mediated editing levels in mNPCs at MOI of 3.0E+5 vg/cell, as described in Example 14.

[0078] FIG. 61A is a graph showing AAV-mediated editing levels in mNPCs at the MOI (in vg/cell) indicated on the x-axis. mNPCs were infected with AAV vectors expressing CasX protein 491 under combination of the ubiquitous CMV promoter and engineered scaffold variants (174, 229-237, construct ID=31, 40-47) and guide 12.7 under the expression of pol III promoter hU6, as described in Example 14. Frequency of tdT+ cells was assessed by FACS 5 days post-transfection. Data (n=3) are presented as mean values.

[0079] FIG. 61B is a graph showing AAV-mediated editing levels in mNPCs at the MOI (in vg/cell) indicated on the x-axis. mNPCs infected with AAV vectors expressing CasX protein 491 under combination of the ubiquitous CMV promoter and engineered scaffold variants (174, 229-237, construct ID=31, 39-47) and guide 12.7 under the expression of pol III promoter hU6, as described in Example 14. Frequency of tdT+ cells was assessed by FACS 5 days post-transfection. Data (n=3) are presented as mean values. Note, construct 39 has scaffold 229.

[0080] FIG. 62 is a bar graph displaying fold-change in editing levels for AAV constructs with engineered guide scaffolds (229-237) compared to guide 174 (set to a value of 1; gray dashed line) in cells infected at a 3.0e+5 MOI, as described in Example 14.

[0081] FIG. 63 is a western blot of cell lysates of cells transduced with different siAAV and AAV constructs probed with anti-GAPDH and anti-Cas antibodies, as described in Example 15.

[0082] FIG. 64 is a bar plot bar showing AAV-mediated editing levels (frequency of tdT+ cells) in mNPCs at a 3.0e+5 vg/cell MOI, as described in Example 16.

[0083] FIG. 65 shows western blots demonstrating silencing of CasX expression during AAV production with different shRNA targeting CasX (shRNA 1-12, SEQ ID NOS: 2873-2884 as shown in Table 27), as described in Example 17. Control refers to HEK293T lysate from untreated cells and serves as a control for CasX staining. Construct 29 is the base construct and does not contain any shRNA.

[0084] FIG. 66 is a bar plot based on the scan of the western blot in FIG. 65 displaying relative levels of CasX knockdown normalized to levels of expression detected in the no shRNA control (construct 29), as described in Example 17.

[0085] FIG. 67 shows western blots demonstrating silencing of CasX expression during AAV production with shRNA8 supplementation, as described in Example 18. Control refers to HEK293T lysate from untreated cells, and serves as a control for CasX staining. The three doses for Construct 17 were added to the production in the following shRNA:transgene ratios—1:1, 2:1, and 3:1. AAV.30 (Lane 1) is a negative control which does not contain any shRNA.

[0086] FIG. 68 is a bar graph showing the relative CasX knockdown normalized to CasX expression from FIG. 67. Lane 1 is the negative control, which does not contain any shRNA, as described in Example 18.

[0087] FIG. 69 is a bar graph displaying viral titer yield (viral genome per mL) from AAV (AAV.30) and siAAV vectors (AAV.32, 33) with or without shRNA8 supplementation during production. 1:1, 2:1 and 3:1 ratio of shRNA to transgene plasmid during production is represented by the white triangle, as described in Example 18.

[0088] FIG. 70A is a bar graph displaying the indel rate detected in the ssDNA of AAV genomes packaged with different dose of shRNA8 supplemented during production (ID #17 refers to shRNA8, dose 1:1, 1:2, 1:3 relative to plasmid AAV.33). The percent of indels detected in a self-inactivating AAV vector (AAV.33) are compared to a non-self-inactivating AAV control (AAV.30), as described in Example 18.

[0089] FIG. 70B is a bar graph showing the percent decrease in indels detected in the ssDNA of AAV.33 supplemented with increment doses of shRNA8 (ID=17) normalized to indels levels found in AAV.33 without ShRNA8 supplementation, as described in Example 18.

[0090] FIG. 71 is a bar graph displaying levels of editing as identified by FACS in mNPC-tdT cells infected with self-inactivating AAV vectors (AAV.32, AAV.33) or a non-self-inactivating viral vector (AAV.30), as described in Example 18. Black bars show editing from production with no shRNA supplemented to prevent self-cleavage during packaging, compared to white bars, showing editing levels from vectors supplemented with 3 increment doses of shRNA8 (ID=17) during production, as described in Example 18. Results from 2 viral MOI (3.0e+5, 1.0e+5) were displayed.

[0091] FIG. 72 is a schematic illustrating the various configurations for supplying an shRNA to reduce CasX expression during packaging, as described in Example 17. The shRNA, or shRNAs, can be supplied on the same plasmid as the AAV transgene, on another plasmid in production such as pRepCap or pHelper plasmid, on multiple production plasmids, or on a separate polynucleotide. The black boxes indicate ITRs.

[0092] FIG. 73 is a western blot showing silencing of CasX expression during AAV production using shRNA8, which was produced from constructs that contained the indicated shRNA scaffold (miR-Scribe, miR-E, miR-30a, or miR-Endo) and either a EF1α or U6 promoter, as described in Example 18. AAVs were produced from various constructs that contained different combinations of the indicated elements. Construct ID 30 was used as a base construct that did not contain any shRNA or STALL site (self-inactivating segments, also referred to herein as self-targeting alternative linked loci, or “STALL sites”).

[0093] FIG. 74A is a bar plot showing the western blot quantification of fold knockdown of CasX protein expression for each ‘no STALL’ experimental condition (indicated by construct ID) normalized to the CasX levels determined as a result of using the base construct (construct ID 30), as described in Example 18.

[0094] FIG. 74B is a bar chart showing the western blot quantification of fold knockdown of CasX protein expression for each ‘ATC STALL’ experimental condition (indicated by construct ID) normalized to the CasX levels determined as a result of using the base construct (construct ID 30), as described in Example 18.

[0095] FIG. 75 is a bar graph showing the quantification of siAAV genomes that were determined to be intact (lack of indels detected) by NGS for the indicated experimental conditions, as described in Example 18.

[0096] FIG. 76A is a graph showing the quantification of cleavage rates of RNP of CasX variant 491 and guide 174 on NTC PAMs, as described in Example 19. Timepoints were taken over the course of 10 minutes and the fraction cleaved was graphed for each target and timepoint. For NTC PAMs, only the first two minutes of the time course are shown for clarity.

[0097] FIG. 76B is a graph showing the quantification of cleavage rates of RNP of CasX variant 491 and guide 174 on NTT PAMs, as described in Example 19. Timepoints were taken over the course of 10 minutes and the fraction cleaved was graphed for each target and timepoint.

[0098] FIG. 77A is a bar graph displaying transcript levels detected for CasX, gRNA scaffold 174, and tdTomato in mice brain tissue harvested at three weeks post-treatment with AAVs with (Dual ATC STALL, Dual CTC STALL, or Single ATC STALL) or without (no STALL) the self-inactivation system, as described in Example 21.

[0099] FIG. 77B is a bar graph displaying transcript levels detected for CasX, gRNA scaffold 174, and tdTomato in mice brain tissue harvested at eight weeks post-treatment with AAVs with (Dual ATC STALL, Dual CTC STALL, or Single ATC STALL) or without (no STALL) the self-inactivation system, as described in Example 21.

[0100] FIG. 78 is a bar chart showing the western blot quantification of CasX protein levels at the three-week time point in mouse brain tissue treated with AAV-no STALL, siAAV Dual ATC STALL, siAAV Dual CTC STALL, or siAAV Single ATC STALL, as described in Example 21. CasX protein levels for each siAAV condition was normalized relative to the CasX level in the No STALL group.

[0101] FIG. 79 is a bar graph illustrating the quantification of editing levels at the tdTomato locus identified by histology and cell counting in brain tissue harvested at the three-week time point from mice treated with the indicated conditions, as described in Example 21. NT indicates the group of mice treated with AAVs containing the non-targeting spacer.

[0102] FIG. 80 is a schematic of the general configuration of a construct that would encode for a decoy gRNA, supplied on the same plasmid as the AAV transgene, as an alternative strategy to reduce CasX-mediated editing of the AAV transgene during production, as explored in Example 22. The illustration shows a generic siAAV transgene plasmid, where a U6-driven transcriptional unit that would encode for a decoy gRNA was designed 5′ of the CasX nuclease construct with flanking STALL sites.

[0103] FIG. 81 is a bar chart showing the normalized ratio of CasX titer to bGH titer for each experimental condition testing the effects of using a decoy gRNA for rescuing siAAV titer in the producing cells, as described in Example 22. Here, the CasX nuclease construct in the AAV transgene was flanked by either side with a TTCN STALL site, and decoy gRNAs were designed with guide scaffolds 174, 234, and 235. S=scrambled sequence; NT=non-targeting spacer; NS=no spacer, scaffold only.

[0104] FIG. 82 is a graph showing the results of an editing assay using AAV transgene plasmids nucleofected into hNPCs, as described in Example 23, demonstrating that CpG reduction or depletion within the U1a promoter (construct ID 178 and 179), U6 promoter (construct ID 180 and 181), or bGH poly(A) (construct ID 182) did not significantly reduce CasX-mediated editing at the B2M locus compared to the editing achieved with the original CpG+ AAV vector (construct ID 177). The controls used in this experiment were the non-targeting (NT) spacer and no treatment (NTx).

[0105] FIG. 83 is a bar plot depicting the results of an editing assay measured as indel rate detected by NGS at the human B2M locus in human induced neurons (iNs) seven days post-transduction with AAVs expressing CasX 491 driven by the various protein promoters as indicated at an MOI of 1E3 or 3E3, as described in Example 23.

[0106] FIG. 84A is a bar plot that illustrate the quantification of percent editing at the B2M locus as detected by NGS seven days post-transduction of AAVs into human iNs at an MOI of 3E3, as described in Example 23.

[0107] FIG. 84B is a bar plot that illustrate the quantification of percent editing at the B2M locus as detected by NGS seven days post-transduction of AAVs into human iNs at an MOI of 1E3, as described in Example 23.

[0108] FIG. 85 is a general schematic depicting various configurations in which the shRNA transcriptional unit can be arranged and stacked when supplied on the same plasmid as the AAV transgene, as described in Example 26. The black boxes indicate ITRs.

[0109] FIG. 86 is a bar chart showing the quantification of fold knockdown of CasX protein expression for each construct tested (indicated by construct ID) relative to the CasX levels determined as a result of using construct ID 32, as described in Example 26. Key attributes of each construct are shown in the table below the bar chart.

[0110] FIG. 87 is a bar graph depicting the quantification of siAAV genomes that were determined to be intact (lack of indels detected) by NGS for the indicated constructs, as described in Example 26. Key attributes of each construct are shown in the table below the bar graph.

[0111] FIG. 88 is a bar chart showing the quantification of fold knockdown of CasX protein expression for each construct tested (indicated by construct ID) relative to the CasX levels determined as a result of using construct ID 139, as described in Example 26. Key attributes of each construct are shown in the table below the bar chart.

[0112] FIG. 89 is a bar graph depicting the quantification of ssAAV genomes that were determined to be intact (lack of indels detected) by NGS for the indicated constructs, as described in Example 26. Key attributes of each construct are shown in the table below the bar graph.

[0113] FIG. 90 is a bar graph depicting the quantification of ssAAV genomes that were determined to be intact (lack of indels detected) by NGS for the indicated RepCap constructs, as described in Example 27. Construct ID 146 was used for the packaged AAV transgene. Key attributes of each construct are shown in the table below the bar graph.

[0114] FIG. 91 is a graph plotting the RNA abundance ratio, determined as log 2(cDNA reads/viral DNA input reads) calculated across ten summed technical replicates per unique poly(A) library member assessed during the high-throughput screen, as described in Example 6. The depicted data were for one biological replicate. The bGH poly(A) sequence is highlighted as a positive control.

[0115] FIG. 92 is a schematic of the regions and domains of a guide RNA used to design a scaffold library, as described in Example 28.

[0116] FIG. 93 is a pie chart of the relative distribution and design of the scaffold library with both unbiased (double and single mutations) and targeted mutations (towards the triplex, scaffold stem bubble, pseudoknot, and extended stem and loop) indicated, as described in Example 28.

[0117] FIG. 94 is a schematic of the triplex mutagenesis designed to specifically incorporate alternate triplex-forming base pairs into the triplex, as described in Example 28. Solid lines indicate the Watson-Crick pair in the triplex; the third strand nucleotide is indicated as a dotted line representing the non-canonical interaction with the purine of the duplex. In the library, each of the 5 locations indicated was replaced with all possible triplex motifs (G:GC, T:AT, G:GC)=243 sequences. The sequence shown is:

(SEQ ID NO: 2332)
ACUGGCGCUUUUAUCUGAUUACUUUGAGAGCCAUCANNNAUCAAAG.

[0118] FIG. 95 is a bar chart with results of the enrichment values of reference guide scaffolds 174 and 175 in each screen, as described in Example 28.

[0119] FIG. 96 is a flow-chart illustrating the qualitative relationship between tested combinations of mutations and their effect on both activity and specificity of the resulting CasX variants, as described in Example 29.

[0120] FIG. 97 is a pair of heat maps for single mutants in guide scaffolds 174 (SEQ ID NO: 2238) and 175 (SEQ ID NO: 2239) showing specific mutable regions in the scaffold across the sequences, as described in Example 28. Yellow shades reflect values with similar enrichment to the reference scaffolds; red shades indicate an increase in enrichment, and thus activity, relative to the reference scaffold; blue shades indicate a loss of activity relative to the wildtype scaffold; white indicates missing data (or a substitution that would result in wildtype sequence.

[0121] FIG. 98 is a scatterplot that compares the log 2 enrichment of single nucleotide mutations on reference guide scaffolds 174 and 175, as described in Example 28. Only those mutations to positions that were analogous between 174 and 175 are shown. Results suggest that, overall, guide scaffold 174 is more tolerant to changes than 175.

[0122] FIG. 99 is a bar chart showing the average (and 95% confidence interval) log 2 enrichment values for a set of scaffolds in which the pseudoknot pairs have been shuffled, such that each new pseudoknot has the same composition of base pairs, but in a different order within the stem, as described in Example 28. Each bar represents a set of scaffolds with the G:A (or A:G) pair location indicated (see diagram at right). 291 pseudoknot stems were tested; numbers above bars indicate the number of stems with the G:A (or A:G) pair at each position.

[0123] FIG. 100 is a schematic of the pseudoknot sequence of FIG. 92, given 5′ to 3′, with the two strand sequences separated by an underscore.

[0124] FIG. 101 is a bar chart showing the average (and 95% confidence interval) log 2 enrichment values for scaffolds, divided by the predicted secondary structure stability of the pseudoknot stem region, as described in Example 28. Scaffolds with very stable stems (e.g., ΔG<−7 kcal/mol) had high enrichment values on average, whereas scaffolds with destabilized stems (ΔG≥−5 kcal/mol) had low enrichment values on average.

[0125] FIG. 102 is a heat map of all double mutants of positions 7 and 29 in scaffold 175, as described in Example 28. The pseudoknot sequence is given 5′ to 3′, on the right.

[0126] FIG. 103 is a graph of a survival assay to determine the selective stringency of the CcdB selection to different spacers when targeted by CasX protein 515 and scaffold 174, as described in Example 29.

[0127] FIG. 104 illustrates the schematics of AAV plasmid constructs containing various configurations of the gRNA transcriptional unit (Pol III U6 promoter driving the expression of the gRNA scaffold and indicated spacer) as described in Example 7.

[0128] FIG. 105 is a graph showing the quantification of percent editing at the tdTomato locus in mNPCs five days post-transduction with AAVs produced from the indicated AAV constructs, as described in Example 7. Editing was assessed by FACS five days post-transduction.

[0129] FIG. 106 depicts the results of an editing assay measured as indel rate detected by NGS at the DMPK 3′ UTR locus for the indicated AAV dual-guide systems transduced into HEK293T cells in a series of three-fold dilution, as described in Example 9.

[0130] FIG. 107 is a bar chart displaying the breakdown of indels generated by type of editing (single edit at the 5′ or 3′ of CTG repeat or double-cut resulting in CTG repeat dropout) at the DMPK 3′ UTR locus by AAVs harboring the dual guides and 20.7 and 20.11 spacer combination, as described in Example 9. The percentage of single or dual-edits were calculated from the total percent of reads analyzed.

[0131] FIG. 108 is a bar plot showing the quantification of percent editing measured as indel rate detected by NGS at the ROSA26 locus for the indicated AAV constructs nucleofected into C2C12 myoblasts or mouse NPCs to assess the effects of individual muscle-specific promoters on editing rates, as described in Example 30.

[0132] FIG. 109 is a scatter plot of percent editing versus promoter size for all the AAV constructs with varying promoters tested, as described in Example 30.

[0133] FIG. 110A is a diagram of the secondary structure of guide RNA scaffold 235, noting the regions with CpG motifs, as described in Example 23. CpG motifs in (1) the pseudoknot stem, (2) the scaffold stem, (3) the extended stem bubble, (4) the extended step, and (5) the extended stem loop are labeled on the structure.

[0134] FIG. 110B is a diagram of the CpG-reducing mutations that were introduced into each of the five regions in the coding sequence of the guide RNA scaffold, as described in Example 23.

[0135] FIG. 111A provides the results of an editing experiment in which AAV vectors with various CpG-reduced or CpG-depleted guide RNA scaffolds were used to edit the B2M locus in induced neurons, as described in Example 23. The AAV vectors were administered at a multiplicity of infection (MOI) of 4e3. The bars show the mean±the SD of two replicates per sample. “No Tx” indicates a non-transduced control, and “NT” indicates a control with a non-targeting spacer.

[0136] FIG. 111B provides the results of an editing experiment in which AAV vectors with various CpG-reduced or CpG-depleted guide RNA scaffolds were used to edit the B2M locus in induced neurons, as described in Example 23. The AAV vectors were administered at an MOI of 3e3. The bars show the mean±the SD of two replicates per sample. “No Tx” indicates a non-transduced control.

[0137] FIG. 111C provides the results of an editing experiment in which AAV vectors with various CpG-reduced or CpG-depleted guide RNA scaffolds were used to edit the B2M locus in induced neurons, as described in Example 23. The AAV vectors were administered at an MOI of 1e3. The bars show the mean±the SD of two replicates per sample. “No Tx” indicates a non-transduced control.

[0138] FIG. 111D provides the results of an editing experiment in which AAV vectors with various CpG-reduced or CpG-depleted guide RNA scaffolds were used to edit the B2M locus in induced neurons, as described in Example 23. The AAV vectors were administered at an MOI of MOI=3e2. The bars show the mean±the SD of two replicates per sample. “No Tx” indicates a non-transduced control.

[0139] FIG. 112 shows the schematics of AAV constructs with additional alternative gRNA configurations for constructs having two gRNAs, as described in Example 9. The tapered points depict the orientation of the transcriptional unit for CasX protein or gRNA.

[0140] FIG. 113 is a bar graph depicting the quantification of siAAV genomes that were determined to be intact (lack of indels detected) by NGS for the indicated constructs, which contained STALL sites with alternative PAMs, as described in Example 12.

[0141] FIG. 114 is a bar plot showing the quantification of ssAAV genomes that were determined to be intact (lack of indels detected) by NGS for the AAVs containing the indicated STALL sites produced using pRepCap construct 167, as described in Example 27.

[0142] FIG. 115A is a bar graph showing the quantification of percent editing measured as indel rate detected at the ROSA26 locus in C2C12 myoblasts and myotubes transduced with AAVs containing the indicated promoters to drive CasX expression at an MOI of 3E5 vg/cell, as described in Example 30.

[0143] FIG. 115B is a bar graph showing the quantification of percent editing measured as indel rate detected at the ROSA26 locus in C2C12 myoblasts and myotubes transduced with AAVs containing the indicated promoters to drive CasX expression at an MOI of 1E5 vg/cell, as described in Example 30.

[0144] FIG. 116 is a bar graph showing the quantification of percent editing measured as indel rate detected at the ROSA26 locus in the indicated tissues harvested from mice injected with AAVs containing the indicated promoters driving CasX expression, as described in Example 30. As experimental controls, mice were either untreated (naïve) or injected with AAVs containing UbC promoter driving CasX expression with a non-targeting gRNA. N=3 animals per promoter experimental condition; N=2 animals for the untreated control group.

[0145] FIG. 117 is a bar graph quantifying average CasX expression, normalized by vg/dg, driven by muscle-specific promoters CK8e or MHC7 relative to CasX expression driven by UbC, for the indicated tissues harvested from mice injected with AAVs containing the indicated promoters, as described in Example 30. N=3 animals per promoter experimental condition.

[0146] FIG. 118 is a box plot showing the quantification of percent editing at the ROSA26 locus in retinae harvested from mice treated with subretinal injections of AAVs expressing CasX 491 driven by the indicated photoreceptor-specific promoters with a ROSA26-targeting spacer, as described in Example 34. The dashed line indicates the theoretical maximum editing of photoreceptors that can be achieved with optimal transduction.

[0147] FIG. 119A is a panel of scatterplots for promoter variants GRK1(292)-SV40 and GRK1(292), showing the correlation of vg/dg with the editing level achieved for a particular promoter used to drive CasX expression in the retinae, as described in Example 34. A nonlinear regression curve was fitted to assess the correlation, and the values of the slopes, along with their corresponding standard deviation values, of these curves were determined and reported in Table 59.

[0148] FIG. 119B is a panel of scatterplots for promoter variants GRK1(241) and GRK1(199), showing the correlation of vg/dg with the editing level achieved for a particular promoter used to drive CasX expression in the retinae, as described in Example 34. A nonlinear regression curve was fitted to assess the correlation, and the values of the slopes, along with their corresponding standard deviation values, of these curves were determined and reported in Table 59.

[0149] FIG. 119C is a panel of scatterplots for the indicated promoter variants GRK1(94) and GRK1(93), showing the correlation of vg/dg with the editing level achieved for a particular promoter used to drive CasX expression in the retinae, as described in Example 34. A nonlinear regression curve was fitted to assess the correlation, and the values of the slopes, along with their corresponding standard deviation values, of these curves were determined and reported in Table 59.

[0150] FIG. 120 is a bar plot showing the results of an editing assay at the tdTomato locus assessed by FACS in mNPCs nucleofected with AAV plasmids encoding for AAVs expressing the CasX:dual-gRNA system with the indicated configurations and spacer combinations for the two gRNA units relative to the CasX construct, as described in Example 37. The “R” preceding the spacer denotes the reverse orientation of the transcription of the indicated gRNA unit. An AAV plasmid encoding for AAVs expressing CasX 491 with a single gRNA transcriptional unit using spacer 12.7 as well as an untreated well served as experimental controls.

[0151] FIG. 121A is a line graph showing the results of an editing assay at the tdTomato locus assessed by FACS in mNPCs transduced with AAVs expressing the CasX:dual-gRNA system at varying MOIs, with the indicated spacer combinations of the two gRNA units arranged in configuration #1 relative to the CasX construct, as described in Example 37. An untreated control was included for comparison.

[0152] FIG. 121B is a line graph showing the results of an editing assay at the tdTomato locus assessed by FACS in mNPCs transduced with AAVs expressing the CasX:dual-gRNA system at varying MOIs, with the indicated spacer combinations of the two gRNA units arranged in configuration #4 relative to the CasX construct, as described in Example 37. The “R” preceding the spacer denotes the reverse orientation of the transcription of the indicated gRNA unit. An untreated control was included for comparison.

[0153] FIG. 121C is a line graph showing the results of an editing assay at the tdTomato locus assessed by FACS in mNPCs transduced with AAVs expressing the CasX:dual-gRNA system at varying MOIs, with the indicated spacer combinations of the two gRNA units arranged in configuration #2 relative to the CasX construct, as described in Example 37. An untreated control was included for comparison.

[0154] FIG. 122 is a bar graph showing the results of an editing assay at the tdTomato locus assessed by FACS in mNPCs transduced with AAVs expressing the CasX:dual-gRNA system for indicated configurations #1, #4, and #2, as described in Example 37. AAVs expressing CasX 491 with a single gRNA transcriptional unit using spacer 12.7 served as an experimental control.

[0155] FIG. 123A is a box plot showing median, minimal and highest editing values using AAV-mediated expression of CasX 491 detected by NGS 3 weeks post-injection in wild-type retinae injected with 5.0e+9 vg/eye of AAV.X.491.174.11.30 vectors, in which the 491 protein is driven by promoter variants designed to selectively express in rod photoreceptors (X=RP1-RP5) or a ubiquitous promoter (X=CMV), as described in Example 33. The grey line is placed at the editing levels achieved by AAV.RP1.491.174.11.30 to compare to other viral vectors tested.

[0156] FIG. 123B is a plot displaying levels of editing achieved by AAV vectors in wild-type retinae injected with 5.0e+9 vg/eye of AAV.X.491.174.11.30 vectors, compared to total transgene size (bp), as described in Example 33. The grey line delimitates transgenes below or above 4.9 kb size.

[0157] FIG. 124 is a graph showing in vivo editing results that AAV-mediated expression of CasX 491 and gRNA spacer 174.4.76 in rod photoreceptors led to detectable levels of editing levels at integrated Nrl-GFP locus in a dose-dependent manner, as described in Example 33. The bar graph shows editing levels detected by NGS at the integrated GFP locus 4-weeks and 12-weeks post-injection in heterozygous Nrl-GFP mice injected with the indicated doses of AAV.RP1.491.174.4.76 vectors in one eye, and the vehicle control in the contralateral eye).

[0158] FIG. 125A is a scatter boxplot representing levels of GFP protein detected in the western blots and quantified by densitometry, from which ratios of densitometric values of the GFP band for total amount of proteins were normalized to the vehicle group levels, as described in Example 33. One-way ANOVA statistical analysis was performed (*=p<0.5).

[0159] FIG. 125B is a plot correlating GFP protein fraction to levels of percent editing achieved in mouse retinae of the AAV-treated mice, for both the 1.0e+9 and 1.0e+10 dose groups, as described in Example 33.

[0160] FIG. 126A is a bar graph representing the ratio of GFP fluorescence levels (superior to inferior retina mean grey values) detected by fundus imaging at 4-weeks compared to 12-weeks post-injection in mice injected with two dose levels of AAV constructs, as described in Example 33.

[0161] FIG. 126B displays representative images of fluorescence fundus imaging of GFP in retina from mice injected with 1.0e+9 vg (#13) or 1.0e+10 vg (#34) with the AAV constructs at 4-weeks and (left panel) or 12-weeks (right panel), as described in Example 33.

[0162] FIG. 127 present histology images or retinae of mice stained with various immunochemistry reagents, as described in Example 33, confirming efficient knock-down of GFP in photoreceptor cells in an AAV-dose dependent manner. The images are representative confocal images of cross-sectioned retinae injected with vehicle (panels A, B, C, D), AAV-CasX at a 1.0e+9 vg dose (panels E, F, G, and H) and 1.0E+10 vg dose (panels I, J, K, and L). Structural imaging shows GFP expression by rod photoreceptors in the outer segment (images in panels A, E, I and images in panels C, G, and K for 20× and 40× magnifications, respectively). Cell nuclei were counterstained with Hoechst (panels B, F, and J) and cells stained with anti-HA to correlate levels of HA (CasX transgene levels; panels D, H, and L; 40× magnification) and GFP expressed in photoreceptors. White box outlines in B and F indicate retinal regions analyzed at 40× magnification in panels C and G. Legend: RPE=retinal pigment epithelium, OS=outer segment, ONL=outer nuclear layer, INL=inner nuclear layer, GCL=ganglion.

[0163] FIG. 128 is a bar graph showing the number of viral genomes per diploid genome (vg/dg) in the right hemisphere of the cortex of mice administered siAAVs with zero, one, or two STALL sites three weeks following administration, as described in Example 35.

[0164] FIG. 129A is a bar graph showing the abundance of mRNA encoding CasX in the right hemisphere of the cortex of mice administered siAAVs with zero, one, or two STALL sites three weeks following administration, as described in Example 35.

[0165] FIG. 129B is a bar graph showing the abundance of guide scaffold 235 RNA in the right hemisphere of the cortex of mice administered siAAVs with zero, one, or two STALL sites three weeks following administration, as described in Example 35.

[0166] FIG. 130 is a bar graph showing a quantification of percent editing measured as indel rate detected at the ROSA26 locus in mice administered siAAVs with zero, one, or two STALL sites three weeks following administration, as described in Example 35. Editing was measured in the right hemisphere of the cortex.

[0167] FIG. 131 is a bar graph showing the number of viral genomes per diploid genome (vg/dg) in the liver and cortex of mice administered siAAVs with zero, one, or two STALL sites 16 weeks following administration, as described in Example 35. The vg/dg in the cortex is the average of the right and left hemispheres of the cortex for each animal.

[0168] FIG. 132A is a bar graph showing the abundance of mRNA encoding CasX in the liver of mice administered siAAVs with zero, one, or two STALL sites three weeks following administration, as described in Example 35.

[0169] FIG. 132B is a bar graph showing the abundance of mRNA encoding CasX in the cortex of mice administered siAAVs with zero, one, or two STALL sites three weeks following administration, as described in Example 35. The mRNA abundance in the cortex is the average of the right and left hemispheres of the cortex for each animal.

[0170] FIG. 133A is a bar graph showing the abundance of guide scaffold 235 RNA in the liver of mice administered siAAVs with zero, one, or two STALL sites three weeks following administration, as described in Example 35.

[0171] FIG. 133B is a bar graph showing the abundance of guide scaffold 235 RNA in the cortex of mice administered siAAVs with zero, one, or two STALL sites three weeks following administration, as described in Example 35. The RNA abundance in the cortex is the average of the right and left hemispheres of the cortex for each animal.

[0172] FIG. 134 is a bar graph showing a quantification of percent editing measured as indel rate detected at the ROSA26 locus in mice administered siAAVs with zero, one, or two STALL sites 16 weeks following administration, as described in Example 35. Editing was measured in the right hemisphere of the cortex, the left hemisphere of the cortex, and the liver, as indicated on the y-axis.

[0173] FIG. 135A is a bar plot showing the quantification of percent editing at the B2M locus in human induced neurons (iNs) transduced with AAVs expressing the indicated constructs containing various poly(A) signal sequences at an MOI of 1E2 vg/cell, as described in Example 6.

[0174] FIG. 135B is a bar plot showing the quantification of percent editing at the B2M locus in human induced neurons (iNs) transduced with AAVs expressing the indicated constructs containing various poly(A) signal sequences at an MOI of 1E3 vg/cell, as described in Example 6.

### DETAILED DESCRIPTION

[0175] While exemplary embodiments have been shown and described herein, it will be obvious to those skilled in the art that such embodiments are provided by way of example only. Numerous variations, changes, and substitutions will now occur to those skilled in the art without departing from the inventions claimed herein. It should be understood that various alternatives to the embodiments described herein may be employed in practicing the embodiments of the disclosure. It is intended that the claims define the scope of the invention and that methods and structures within the scope of these claims and their equivalents be covered thereby.

[0176] Unless otherwise defined, all technical and scientific terms used herein have the same meaning as commonly understood by one of ordinary skill in the art to which this invention belongs. Although methods and materials similar or equivalent to those described herein can be used in the practice or testing of the present embodiments, suitable methods and materials are described below. In case of conflict, the patent specification, including definitions, will control. In addition, the materials, methods, and examples are illustrative only and not intended to be limiting. Numerous variations, changes, and substitutions will now occur to those skilled in the art without departing from the invention.

### Definitions

[0177] “Hybridizable” or “complementary” are used interchangeably to mean that a nucleic acid (e.g., RNA, DNA) comprises a sequence of nucleotides that enables it to non-covalently bind, i.e., form Watson-Crick base pairs and/or G/U base pairs, “anneal”, or “hybridize,” to another nucleic acid in a sequence-specific, antiparallel, manner (i.e., a nucleic acid specifically binds to a complementary nucleic acid) under the appropriate in vitro and/or in vivo conditions of temperature and solution ionic strength. It is understood that the sequence of a polynucleotide need not be 100% complementary to that of its target nucleic acid to be specifically hybridizable; it can have at least about 70%, at least about 80%, or at least about 90%, or at least about 95% sequence identity and still hybridize to the target nucleic acid. Moreover, a polynucleotide may hybridize over one or more segments such that intervening or adjacent segments are not involved in the hybridization event (e.g., a loop structure or hairpin structure, a ‘bulge’, ‘bubble’ and the like). Thus, the skilled artisan will understand that while individual bases within a sequence may not be complementary to another sequence, the sequence as a whole is still considered to be complementary.

[0178] A “gene,” for the purposes of the present disclosure, includes a DNA region encoding a gene product (e.g., a protein, RNA), as well as all DNA regions which regulate the production of the gene product, whether or not such regulatory sequences are adjacent to coding and/or transcribed sequences. Accordingly, a gene may include accessory element sequences including, but not necessarily limited to, promoter sequences, terminators, translational regulatory sequences such as ribosome binding sites and internal ribosome entry sites, enhancers, silencers, insulators, boundary elements, replication origins, matrix attachment sites and locus control regions. Coding sequences encode a gene product upon transcription or transcription and translation; the coding sequences of the disclosure may comprise fragments and need not contain a full-length open reading frame. A gene can include both the strand that is transcribed as well as the complementary strand containing the anticodons.

[0179] As used herein, a singular reference to an agent may also refer to a plurality of the agent, e.g., vector and vectors. Similarly, the terms “polynucleotide,” “polynucleotide sequence,” “nucleotide,” “nucleic acid” and “nucleic acid sequence” may be used interchangeably.

[0180] The term “downstream” refers to a nucleotide sequence that is located 3′ to a reference nucleotide sequence. In certain embodiments, downstream nucleotide sequences relate to sequences that follow the starting point of transcription. For example, the translation initiation codon of a gene is located downstream of the start site of transcription.

[0181] The term “upstream” refers to a nucleotide sequence that is located 5′ to a reference nucleotide sequence. In certain embodiments, upstream nucleotide sequences relate to sequences that are located on the 5′ side of a coding region or starting point of transcription. For example, most promoters are located upstream of the start site of transcription.

[0182] The term “adjacent to” with respect to polynucleotide or amino acid sequences refers to sequences that are next to, or adjoining each other in a polynucleotide or polypeptide. The skilled artisan will appreciate that two sequences can be considered to be adjacent to each other and still encompass a limited amount of intervening sequence, e.g., 1, 2, 3, 4, 5, 6, 7, 8, 9 or 10 nucleotides or amino acids.

[0183] The term “regulatory element” is used interchangeably herein with the term “regulatory sequence,” and is intended to include promoters, enhancers, and other expression regulatory elements. It will be understood that the choice of the appropriate regulatory element will depend on the encoded component to be expressed (e.g., protein or RNA) or whether the nucleic acid comprises multiple components that require different polymerases or are not intended to be expressed as a fusion protein.

[0184] The term “accessory element” is used interchangeably herein with the term “accessory sequence,” and is intended to include, inter alia, polyadenylation signals (poly(A) signal), enhancer elements, introns, posttranscriptional regulatory elements (PTREs), nuclear localization signals (NLS), deaminases, DNA glycosylase inhibitors, additional promoters, factors that stimulate CRISPR-mediated homology-directed repair (e.g. in cis or in trans), activators or repressors of transcription, self-cleaving sequences, and fusion domains, for example a fusion domain fused to a CRISPR protein. It will be understood that the choice of the appropriate accessory element or elements will depend on the encoded component to be expressed (e.g., protein or RNA) or whether the nucleic acid comprises multiple components that require different polymerases or are not intended to be expressed as a fusion protein.

[0185] The term “promoter” refers to a DNA sequence that contains a transcription start site and additional sequences to facilitate polymerase binding and transcription. Exemplary eukaryotic promoters include elements such as a TATA box, and/or B recognition element (BRE) and assists or promotes the transcription and expression of an associated transcribable polynucleotide sequence and/or gene (or transgene). A promoter can be synthetically produced or can be derived from a known or naturally occurring promoter sequence or another promoter sequence. A promoter can be proximal or distal to the gene to be transcribed. A promoter can also include a chimeric promoter comprising a combination of two or more heterologous sequences to confer certain properties. A promoter of the present disclosure can include variants of promoter sequences that are similar in composition, but not identical to, other promoter sequence(s) known or provided herein. A promoter can be classified according to criteria relating to the pattern of expression of an associated coding or transcribable sequence or gene operably linked to the promoter, such as constitutive, developmental, tissue-specific, inducible, etc. A promoter can also be classified according to its strength. As used in the context of a promoter, “strength” refers to the rate of transcription of the gene controlled by the promoter. A “strong” promoter means the rate of transcription is high, while a “weak” promoter means the rate of transcription is relatively low.

[0186] A promoter of the disclosure can be a Polymerase II (Pol II) promoter. Polymerase II transcribes all protein coding and many non-coding genes. A representative Pol II promoter includes a core promoter, which is a sequence of about 100 base pairs surrounding the transcription start site, and serves as a binding platform for the Pol II polymerase and associated general transcription factors. The promoter may contain one or more core promoter elements such as the TATA box, BRE, Initiator (INR), motif ten element (MTE), downstream core promoter element (DPE), downstream core element (DCE), although core promoters lacking these elements are known in the art.

[0187] A promoter of the disclosure can be a Polymerase III (Pol III) promoter. Pol III transcribes DNA to synthesize small ribosomal RNAs such as the 5S rRNA, tRNAs, and other small RNAs. Representative Pol III promoters use internal control sequences (sequences within the transcribed section of the gene) to support transcription, although upstream elements such as the TATA box are also sometimes used. All Pol III promoters are envisaged as within the scope of the instant disclosure.

[0188] The term “enhancer” refers to regulatory DNA sequences that, when bound by specific proteins called transcription factors, regulate the expression of an associated gene. Enhancers may be located in the intron of the gene, or 5′ or 3′ of the coding sequence of the gene. Enhancers may be proximal to the gene (i.e., within a few tens or hundreds of base pairs (bp) of the promoter), or may be located distal to the gene (i.e., thousands of bp, hundreds of thousands of bp, or even millions of bp away from the promoter). A single gene may be regulated by more than one enhancer, all of which are envisaged as within the scope of the instant disclosure.

[0189] As used herein, a “post-transcriptional regulatory element (PTRE),” such as a hepatitis PTRE, refers to a DNA sequence that, when transcribed creates a tertiary structure capable of exhibiting post-transcriptional activity to enhance or promote expression of an associated gene operably linked thereto.

[0190] “Recombinant,” as used herein, means that a particular nucleic acid (DNA or RNA) is the product of various combinations of cloning, restriction, and/or ligation steps resulting in a construct having a structural coding or non-coding sequence distinguishable from endogenous nucleic acids found in natural systems. Generally, DNA sequences encoding the structural coding sequence can be assembled from cDNA fragments and short oligonucleotide linkers, or from a series of synthetic oligonucleotides, to provide a synthetic nucleic acid which is capable of being expressed from a recombinant transcriptional unit contained in a cell or in a cell-free transcription and translation system. Such sequences can be provided in the form of an open reading frame uninterrupted by internal non-translated sequences, or introns, which are typically present in eukaryotic genes. Genomic DNA comprising the relevant sequences can also be used in the formation of a recombinant gene or transcriptional unit. Sequences of non-translated DNA may be present 5′ or 3′ from the open reading frame, where such sequences do not interfere with manipulation or expression of the coding regions, and may indeed act to modulate production of a desired product by various mechanisms (see “enhancers” and “promoters”, above).

[0191] The term “recombinant polynucleotide” or “recombinant nucleic acid” refers to one which is not naturally occurring, e.g., is made by the artificial combination of two otherwise separated segments of sequence through human intervention. This artificial combination is often accomplished by either chemical synthesis means, or by the artificial manipulation of isolated segments of nucleic acids, e.g., by genetic engineering techniques. Such is usually done to replace a codon with a redundant codon encoding the same or a conservative amino acid, while typically introducing or removing a sequence recognition site. Alternatively, it is performed to join together nucleic acid segments of desired functions to generate a desired combination of functions. This artificial combination is often accomplished by either chemical synthesis means, or by the artificial manipulation of isolated segments of nucleic acids, e.g., by genetic engineering techniques.

[0192] Similarly, the term “recombinant polypeptide” or “recombinant protein” refers to a polypeptide or protein which is not naturally occurring, e.g., is made by the artificial combination of two otherwise separated segments of amino sequence through human intervention. Thus, e.g., a protein that comprises a heterologous amino acid sequence is recombinant.

[0193] As used herein, “lipid nanoparticle” refers to a transfer vehicle comprising one or more lipids (e.g., cationic lipids, non-cationic lipids, and PEG-modified lipids). Preferably, the lipid nanoparticles are formulated to contain and to deliver one or more vectors to one or more target cells. Examples of suitable lipids include, for example, the phosphatidyl compounds (e.g., phosphatidylglycerol, phosphatidylcholine, phosphatidylserine, phosphatidylethanolamine, sphingolipids, cerebrosides, and gangliosides).

[0194] As used herein, the term “contacting” means establishing a physical connection between two or more entities. For example, contacting a target nucleic acid with a guide nucleic acid means that the target nucleic acid and the guide nucleic acid are made to share a physical connection; e.g., can hybridize if the sequences share sequence similarity.

[0195] As used herein, the term “self-inactivating recombinant vector” or “SIRV” are compositions wherein the expression or activity of one or more components encoded by the polynucleotide of the self-inactivating recombinant vector is capable of being diminished or eliminated by cleavage of a polynucleotide by an RNP of the CRISPR nuclease and a guide RNA encoded by the polynucleotide, resulting in the inability of one or more of the CRISPR components of the vector to be subsequently expressed. For clarity, self-inactivating should not be taken to mean that all such constructs are rendered inactive with respect to the expression and function of the CRISPR nuclease and guide RNA, but that the expression or activity of the components may be reduced.

[0196] “Dissociation constant”, or “K_{d}”, are used interchangeably and mean the affinity between a ligand “L” and a protein “P”; i.e., how tightly a ligand binds to a particular protein. It can be calculated using the formula K_{d}=[L]/[P]/[LP], where [P], [L] and [LP] represent molar concentrations of the protein, ligand and complex, respectively.

[0197] The disclosure provides compositions and methods useful for modifying a target nucleic acid. As used herein “modifying” and “modification” are used interchangeably and include, but are not limited to, cleaving, nicking, editing, deleting, knocking in, knocking out, and the like.

[0198] The term “knock-out” refers to the elimination of a gene or the expression of a gene. For example, a gene can be knocked out by either a deletion or an addition of a nucleotide sequence that leads to a disruption of the reading frame. As another example, a gene may be knocked out by replacing a part of the gene with an irrelevant sequence. The term “knock-down” as used herein refers to reduction in the expression of a gene or its gene product(s). As a result of a gene knock-down, the protein activity or function may be attenuated or the protein levels may be reduced or eliminated.

[0199] As used herein, “homology-directed repair” (HDR) refers to the form of DNA repair that takes place during repair of double-strand breaks in cells. This process requires nucleotide sequence homology, and uses a donor template to repair or knock-out a target DNA, and leads to the transfer of genetic information from the donor to the target. Homology-directed repair can result in an alteration of the sequence of the target sequence by insertion, deletion, or mutation if the donor template differs from the target DNA sequence and part or all of the sequence of the donor template is incorporated into the target DNA.

[0200] As used herein, “non-homologous end joining” (NHEJ) refers to the repair of double-strand breaks in DNA by direct ligation of the break ends to one another without the need for a homologous template (in contrast to homology-directed repair, which requires a homologous sequence to guide repair). NHEJ often results in the loss (deletion) of nucleotide sequence near the site of the double-strand break.

[0201] As used herein “micro-homology mediated end joining” (MMEJ) refers to a mutagenic DSB repair mechanism, which always associates with deletions flanking the break sites without the need for a homologous template (in contrast to homology-directed repair, which requires a homologous sequence to guide repair). MMEJ often results in the loss (deletion) of nucleotide sequence near the site of the double-strand break.

[0202] A polynucleotide or polypeptide has a certain percent “sequence similarity” or “sequence identity” to another polynucleotide or polypeptide, meaning that, when aligned, that percentage of bases or amino acids are the same, and in the same relative position, when comparing the two sequences. Sequence similarity (sometimes referred to as percent similarity, percent identity, or homology) can be determined in a number of different manners. To determine sequence similarity, sequences can be aligned using the methods and computer programs that are known in the art, including BLAST, available over the world wide web at ncbi.nlm.nih.gov/BLAST. Percent complementarity between particular stretches of nucleic acid sequences within nucleic acids can be determined using any convenient method. Example methods include BLAST programs (basic local alignment search tools) and PowerBLAST programs (Altschul et al., J. Mol. Biol., 1990, 215, 403-410; Zhang and Madden, Genome Res., 1997, 7, 649-656) or by using the Gap program (Wisconsin Sequence Analysis Package, Version 8 for Unix, Genetics Computer Group, University Research Park, Madison Wis.), e.g., using default settings, which uses the algorithm of Smith and Waterman (Adv. Appl. Math., 1981, 2, 482-489).

[0203] The terms “polypeptide,” and “protein” are used interchangeably herein, and refer to a polymeric form of amino acids of any length, which can include coded and non-coded amino acids, chemically or biochemically modified or derivatized amino acids, and polypeptides having modified peptide backbones. The term includes fusion proteins, including, but not limited to, fusion proteins with a heterologous amino acid sequence.

[0204] A “vector” or “expression vector” is a replicon, such as plasmid, phage, virus, or cosmid, to which another DNA segment, i.e., an expression cassette, may be attached so as to bring about the replication or expression of the attached segment in a cell.

[0205] The term “naturally-occurring” or “unmodified” or “wild type” as used herein as applied to a nucleic acid, a polypeptide, a cell, or an organism, refers to a nucleic acid, polypeptide, cell, or organism that is found in nature.

[0206] As used herein, a “mutation” refers to an insertion, deletion, substitution, duplication, or inversion of one or more amino acids or nucleotides as compared to a wild-type or reference amino acid sequence or to a wild-type or reference nucleotide sequence.

[0207] As used herein the term “isolated” is meant to describe a polynucleotide, a polypeptide, or a cell that is in an environment different from that in which the polynucleotide, the polypeptide, or the cell naturally occurs. An isolated genetically modified host cell may be present in a mixed population of genetically modified host cells.

[0208] A “host cell,” as used herein, denotes a eukaryotic cell, a prokaryotic cell, or a cell from a multicellular organism (e.g., a cell line) cultured as a unicellular entity, which eukaryotic or prokaryotic cells are used as recipients for a nucleic acid (e.g., an AAV vector), and include the progeny of the original cell which has been genetically modified by the nucleic acid. It is understood that the progeny of a single cell may not necessarily be completely identical in morphology or in genomic or total DNA complement as the original parent, due to natural, accidental, or deliberate mutation. A “recombinant host cell” (also referred to as a “genetically modified host cell”) is a host cell into which has been introduced a heterologous nucleic acid, e.g., an AAV vector.

[0209] A “target cell marker” refers to a molecule expressed by a target cell including but not limited to cell-surface receptors, cytokine receptors, antigens, tumor-associated antigens, glycoproteins, oligonucleotides, enzymatic substrates, antigenic determinants, or binding sites that may be present in the on the surface of a target tissue or cell that may serve as ligands for an antibody fragment.

[0210] The term “conservative amino acid substitution” refers to the interchangeability in proteins of amino acid residues having similar side chains. For example, a group of amino acids having aliphatic side chains consists of glycine, alanine, valine, leucine, and isoleucine; a group of amino acids having aliphatic-hydroxyl side chains consists of serine and threonine; a group of amino acids having amide-containing side chains consists of asparagine and glutamine; a group of amino acids having aromatic side chains consists of phenylalanine, tyrosine, and tryptophan; a group of amino acids having basic side chains consists of lysine, arginine, and histidine; and a group of amino acids having sulfur-containing side chains consists of cysteine and methionine. Exemplary conservative amino acid substitution groups are: valine-leucine-isoleucine, phenylalanine-tyrosine, lysine-arginine, alanine-valine, and asparagine-glutamine.

[0211] As used herein, “treatment” or “treating,” are used interchangeably herein and refer to an approach for obtaining beneficial or desired results, including but not limited to a therapeutic benefit and/or a prophylactic benefit. By therapeutic benefit is meant eradication or amelioration of the underlying disorder or disease being treated. A therapeutic benefit can also be achieved with the eradication or amelioration of one or more of the symptoms or an improvement in one or more clinical parameters associated with the underlying disease such that an improvement is observed in the subject, notwithstanding that the subject may still be afflicted with the underlying disorder.

[0212] The terms “therapeutically effective amount” and “therapeutically effective dose”, as used herein, refer to an amount of a drug or a biologic, alone or as a part of a composition, that is capable of having any detectable, beneficial effect on any symptom, aspect, measured parameter or characteristics of a disease state or condition when administered in one or repeated doses to a subject such as a human or an experimental animal. Such effect need not be absolute to be beneficial.

[0213] As used herein, “administering” means a method of giving a dosage of a compound (e.g., a composition of the disclosure) or a composition (e.g., a pharmaceutical composition) to a subject.

[0214] A “subject” is a mammal. Mammals include, but are not limited to, domesticated animals, non-human primates, humans, dogs, rabbits, mice, rats and other rodents.

[0215] All publications, patents, and patent applications mentioned in this specification are herein incorporated by reference to the same extent as if each individual publication, patent, or patent application was specifically and individually indicated to be incorporated by reference.

### I. General Methods

[0216] The practice of the present invention employs, unless otherwise indicated, conventional techniques of immunology, biochemistry, chemistry, molecular biology, microbiology, cell biology, genomics and recombinant DNA, which can be found in such standard textbooks as Molecular Cloning: A Laboratory Manual, 3rd Ed. (Sambrook et al., Harbor Laboratory Press 2001); Short Protocols in Molecular Biology, 4th Ed. (Ausubel et al. eds., John Wiley & Sons 1999); Protein Methods (Bollag et al., John Wiley & Sons 1996); Nonviral Vectors for Gene Therapy (Wagner et al. eds., Academic Press 1999); Viral Vectors (Kaplift & Loewy eds., Academic Press 1995); Immunology Methods Manual (I. Lefkovits ed., Academic Press 1997); and Cell and Tissue Culture: Laboratory Procedures in Biotechnology (Doyle & Griffiths, John Wiley & Sons 1998), the disclosures of which are incorporated herein by reference.

[0217] Where a range of values is provided, it is understood that endpoints are included and that each intervening value, to the tenth of the unit of the lower limit unless the context clearly dictates otherwise, between the upper and lower limit of that range and any other stated or intervening value in that stated range, is encompassed. The upper and lower limits of these smaller ranges may independently be included in the smaller ranges, and are also encompassed, subject to any specifically excluded limit in the stated range. Where the stated range includes one or both of the limits, ranges excluding either or both of those included limits are also included.

[0218] Unless defined otherwise, all technical and scientific terms used herein have the same meaning as commonly understood by one of ordinary skill in the art to which this invention belongs. All publications mentioned herein are incorporated herein by reference to disclose and describe the methods and/or materials in connection with which the publications are cited.

[0219] It must be noted that as used herein and in the appended claims, the singular forms “a,” “an,” and “the” include plural referents unless the context clearly dictates otherwise.

[0220] It will be appreciated that certain features of the disclosure, which are, for clarity, described in the context of separate embodiments, may also be provided in combination in a single embodiment. In other cases, various features of the disclosure, which are, for brevity, described in the context of a single embodiment, may also be provided separately or in any suitable sub-combination. It is intended that all combinations of the embodiments pertaining to the disclosure are specifically embraced by the present disclosure and are disclosed herein just as if each and every combination was individually and explicitly disclosed. In addition, all sub-combinations of the various embodiments and elements thereof are also specifically embraced by the present disclosure and are disclosed herein just as if each and every such sub-combination was individually and explicitly disclosed herein.

### II. Self-Inactivating Recombinant Vectors

[0221] The present disclosure provides self-inactivating recombinant vectors (SIRV) designed to express Class 2 Type V CRISPR nucleases having a single RNA-guided RuvC domain and one or more guide RNAs to target cells and/or tissues for genetic editing or modification of a target nucleic acid. These SIRV temporally control the expression of one or more of the CRISPR components relative to the editing or modification of the target nucleic acid. A number of approaches to effect the self-inactivating feature of the constructs have been created by the differential design of features of the SIRV constructs of the disclosure and combinations thereof. The self-inactivating features of the SIRV are described herein, which, when incorporated into a viral vector or lipid nanoparticle, confer enhanced safety and a higher degree of specificity to the compositions when utilized for gene editing in a subject compared to systems not employing the self-inactivating features.

[0222] In some embodiments, the SIRV comprise a polynucleotide comprising components that include a packaging component, sequences encoding Class 2 Type V CRISPR components (e.g., nucleases and one or two guide RNA (gRNA)) under the control of regulatory elements and, optionally, one or more accessory elements, and one or more self-inactivating segments, also referred to herein as self-targeting alternative linked loci (“STALL”). The self-inactivating segment polynucleotides comprise a protospacer adjacent motif (PAM) sequence and a polynucleotide sequence capable of hybridizing with the targeting sequence of a gRNA (or is identical to the targeting sequence of a gRNA) encoded by the SIRV. In some embodiments, the self-inactivating segment polynucleotide comprises the 3 nucleotides of a PAM, an intervening nucleotide, and 15-21 nucleotides capable of hybridizing with the targeting sequence of a gRNA (or is identical to the targeting sequence of a gRNA given the double-stranded form of the episome). In a particular embodiment, the self-inactivating segment polynucleotide comprises the 3 nucleotides of a PAM, an intervening nucleotide, and 20 nucleotides capable of hybridizing with the targeting sequence of a gRNA (or is identical to the targeting sequence of a gRNA, given the double-stranded form of the episome). The double-stranded episomal form of the SIRV in a cell, which can include a transfected or transduced cell, is capable of being bound and cleaved by a ribonuclear protein complex (RNP) of the Class 2 CRISPR protein and a gRNA. In some embodiments, the SIRV are delivered directly to a target cell. In other embodiments, the SIRV are incorporated into virus particles, or lipid nanoparticles capable of delivering the SIRV to a target cell, described more fully, below. In either case, the inclusion of a packaging component (e.g., ITRs from AAV or lentivirus) can result in the formation of a double-stranded episomal form of the SIRV within the target cell to be modified.

[0223] The disclosure provides a number of SIRV design configurations that can be used singly or in combination; both for the purpose of providing the CRISPR editing components as well as self-inactivating features designed to reduce or eliminate the expression of the CRISPR components. It will be understood in the sections that follow that the SIRV can be used to transfect cells or can be incorporated into viral particles (such as AAV, adenovirus, lentivirus or gammaretrovirus) or lipid nanoparticles to transduce the cells. In exemplary embodiments, the SIRV is incorporated into an AAV. The description of these designs follow.

[0224] One or multiple copies (e.g., 1, 2, 3, 4 or more) of the self-inactivating segments can be present in several different regions of the SIRV constructs for each of the designs described herein. In some embodiments, an SIRV comprises a self-inactivating segment located: i) 5′ or 3′ adjacent to or within the sequence encoding the Class 2 CRISPR protein having a single RNA-guided RuvC domain; ii) 5′ or 3′ adjacent to or within a Kozak sequence located between the first promoter and the sequence encoding the Class 2 CRISPR protein; iii) 5′ or 3′ adjacent to or within to the first promoter sequence; iv) 5′ or 3′ adjacent to or within the second promoter sequence; v) downstream of the transcriptional start site for the sequence encoding the Class 2 CRISPR protein; vi) within one or more inserted introns in the polynucleotide encoding the Class 2 CRISPR protein; vii) at the 3′ end of the polynucleotide encoding the Class 2 CRISPR protein, between the stop codon and poly(A) termination site; or viii) any combination of (i)-(vi). In some embodiments, multiple copies of the self-inactivating segment are located in any combination of the foregoing locations, provided the self-inactivating segment is complementary to or identical to the targeting sequence of the gRNA. It will be understood that, depending on the design of the SIRV, a self-inactivating segment can be incorporated into the construct or it can be a sequence of nucleotides selected based on the presence of a PAM and a sequence downstream of the PAM that already exists within the components of the SIRV polynucleotide that is complementary to or is identical to the targeting sequence of the gRNA; the components being, e.g., promoters, the sequence encoding the Class 2 Type V protein, Kozak sequence, introns, etc. In some embodiments, an AAV comprises the SIRV construct comprising the foregoing one or more self-inactivating segments. Schematics of such configurations are presented in FIGS. 44-47 and 77, in which self-inactivating segments flank the sequence encoding the CRISPR nuclease. It is understood by one of skill in the art that in the context of an episomal form of an SIRV in a transfected or transduced cell, the foregoing configurations are in reference to the encoding strand.

a. Selective Use of PAM Sequences

[0225] A first designed approach of the SIRV constructs of the present disclosure utilizes a polynucleotide wherein the polynucleotide encodes a single gRNA comprising a targeting sequence complementary to a target nucleic acid and that also targets one or more self-inactivating segments incorporated into the SIRV polynucleotide. In some embodiments, the self-inactivating segments comprise a sequence identical to that of the encoded targeting sequence of the guide, as well as a PAM sequence (separated by a single intervening nucleotide) in the polynucleotide, wherein the PAM sequence proximal to the self-inactivating segment is different from the PAM sequence of the target nucleic acid intended for modification by the CRISPR protein-gRNA complex (RNP). In some embodiments, the polynucleotide comprises a single-stranded DNA transgene for incorporation into a viral particle, such as an adeno-associated virus (AAV); embodiments of which are described more fully, below. It will be understood that in this design, when incorporated into an AAV that is transduced into a target cell to be modified, the targeting sequence of the gRNA of the RNP binds to the anti-sense strand of the double-stranded episomal form in the transduced or transfected cell rather than the self-inactivating segment. As described more fully, below, the PAM of the self-inactivating segment promotes less efficient binding and cleavage and/or a lower rate of cleavage of the self-inactivating segment by the RNP compared to the PAM 5′ and adjacent to the target nucleic acid of the cell to be modified. It will be further understood that because the binding and cleavage of the self-inactivating segment by the RNP of the expressed CRISPR nuclease and gRNA is less efficient compared to that of the target nucleic acid, there can be a difference between the timing of the cleavage and/or the rate of cleavage of the respective sequences; i.e., a higher percentage of the target nucleic acid can be cleaved and edited before the cleavage of the self-inactivating segment that results in the inability to continue to transcribe the CRISPR components of the polynucleotide of the SIRV construct. In other embodiments, the self-inactivating segment incorporated into the polynucleotide is the complement of the targeting segment of the encoded targeting sequence and the selected less-efficient PAM such that the targeting sequence of the gRNA of the RNP binds to the self-inactivating segment of the polynucleotide rather than the anti-sense strand in the double-stranded episomal form created intracellularly.

[0226] In a variation of the foregoing, the present disclosure provides SIRV constructs comprising two gRNA wherein the targeting sequence of the first gRNA is complementary to a target nucleic acid at a first location in a cell to be modified and the targeting sequence of the second gRNA is complementary to both a target nucleic acid at a second location (in order to effect a dual-cut of the target nucleic acid) and is also complementary to the self-inactivating segments of the construct. In some embodiments of the foregoing, the self-inactivating segments are linked to a less-efficient PAM relative to the PAM of the target nucleic acid of the second cut such that there can be a difference between the timing of the cleavage of the target nucleic acid in a cell to be modified and the cleavage and inactivation of the CRISPR components of the SIRV.

[0227] In some embodiments, the encoded Class 2 Type V CRISPR protein is selected from the group consisting of Cas12a (Cpf1), Cas12b (C2c1), Cas12c (C2c3), Cas12d (CasY), Cas12e (CasX), Cas12f, Cas12g, Cas12h, Cas12i, Cas12j, Cas12k, Cas14, and Cas(D, and the encoded guide is that associated with the respective system; e.g., a Cas12a guide for a Cas12a nuclease. In some embodiments, the Class 2 Type V CRISPR protein is a CasX selected from the group consisting of SEQ ID NOS: 1-3, 49-321 and 2356-2488, or a sequence having at least at least about 80%, at least about 85%, at least about 90%, or at least about 95%, or at least about 95%, or at least about 96%, or at least about 97%, or at least about 98%, or at least about 99% sequence identity thereto, and the gRNA comprises a scaffold having a sequence of SEQ ID NOS: 2101-2331,3992-3995, or 4028 as set forth in Table 2, or a sequence having at least at least about 80%, at least about 85%, at least about 90%, or at least about 95%, or at least about 95%, or at least about 96%, or at least about 97%, or at least about 98%, or at least about 99% sequence identity thereto, and the gRNA further comprises a targeting sequence complementary to the target nucleic acid of the cell to be modified and to the self-inactivating segment or its complement. In a particular embodiment, the Class 2 Type V CRISPR protein is a CasX selected from the group consisting of SEQ ID NOS: 72-321 and 2356-2488 as set forth in Table 5, or a sequence having at least at least about 80%, at least about 85%, at least about 90%, or at least about 95%, or at least about 95%, or at least about 96%, or at least about 97%, or at least about 98%, or at least about 99% sequence identity thereto, and the gRNA comprises a scaffold having a sequence of SEQ ID NOS: 2101-2331, 3992-3995, or 4028, as set forth in Table 2, or a sequence having at least at least about 80%, at least about 85%, at least about 90%, or at least about 95%, or at least about 95%, or at least about 96%, or at least about 97%, or at least about 98%, or at least about 99% sequence identity thereto, and the gRNA further comprises a targeting sequence complementary to the target nucleic acid of the cell to be modified and to the self-inactivating segment or its complement. In another particular embodiment, the Class 2 Type V CRISPR protein is a CasX of SEQ ID NOS: 138 or 145 as set forth in Table 5, or a sequence having at least at least about 80%, at least about 85%, at least about 90%, or at least about 95%, or at least about 95%, or at least about 96%, or at least about 97%, or at least about 98%, or at least about 99% sequence identity thereto, and the gRNA comprises a scaffold having a sequence of SEQ ID NOS: 2296 as set forth in Table 2, or a sequence having at least at least about 80%, at least about 85%, at least about 90%, or at least about 95%, or at least about 95%, or at least about 96%, or at least about 97%, or at least about 98%, or at least about 99% sequence identity thereto, and the gRNA further comprises a targeting sequence complementary to the target nucleic acid of the cell to be modified and to the self-inactivating segment or its complement. In another particular embodiment, the Class 2 Type V CRISPR protein is a CasX of SEQ ID NOS: 138 or 145 as set forth in Table 5, or a sequence having at least at least about 80%, at least about 85%, at least about 90%, or at least about 95%, or at least about 95%, or at least about 96%, or at least about 97%, or at least about 98%, or at least about 99% sequence identity thereto, and the gRNA comprises a scaffold having a sequence of SEQ ID NOS: 4028 as set forth in Table 2, or a sequence having at least at least about 80%, at least about 85%, at least about 90%, or at least about 95%, or at least about 95%, or at least about 96%, or at least about 97%, or at least about 98%, or at least about 99% sequence identity thereto, and the gRNA further comprises a targeting sequence complementary to the target nucleic acid of the cell to be modified and to the self-inactivating segment or its complement. Upon the binding and cleavage of the self-inactivating segment by the RNP (which, in the case of a cell transfected with the SIRV or transduced with a viral particle comprising the SIRV, would be incorporated in a double-stranded episome in the cell), the functional expression of one or more of the CRISPR components encoded by the polynucleotide is diminished or prevented; e.g., the Class 2, Type V nuclease or the gRNA. The characteristics and properties of the CRISPR nucleases, gRNA and targeting sequences, and their ability to edit target nucleic acid, are described more fully, below.

[0228] While it is established that the canonical PAM for wild-type CasX (and for several CasX variants) is TTC, the binding preferences for the non-canonical PAM sequences can vary. For example, while the binding preference for the PAM by CasX 491 and 515 is in the order TTC>ATC>CTC>GTC>TTT>GTT, in a 5′ to 3′ orientation, for CasX 668 and 672 the order is TTC>CTC>ATC>GTC>TTT>GTT. As used herein, in relation to PAM sequences “binding preference” means that the binding affinity for the PAM sequence is stronger than that of a different PAM sequence. Accordingly, the PAM sequence of the self-inactivating segment is chosen to take advantage of the preferential PAM binding. In some embodiments, wherein the PAM sequence adjacent to the target nucleic acid of the cell to be modified is TTC and the sequence encoding a CasX having a preference for TTC PAM is incorporated into the transgene of the SIRV, the SIRV is designed to utilize a PAM sequence in the one or more self-inactivating segments selected from the group consisting of ATC, CTC, and GTC, which are less efficient in promoting the binding and cleavage of the adjacent nucleic acid of the self-inactivating segment by the RNP. In other embodiments, wherein the PAM sequence adjacent to the target nucleic acid of the cell to be modified is ATC, then if the CasX preferential PAM or order is TTC>ATC>CTC>GTC>TTT>GTT, the PAM sequence utilized in the one or more self-inactivating segments is CTC, GTC, TTT, or GTT which are less efficient in promoting the binding and cleavage of the adjacent nucleic acid of the self-inactivating segment by the RNP. It has been discovered that in the generation of CasX variants, in some cases, select CasX variants preferentially or more efficiently bind PAM sequences in the order ATC>CTC>GTC>TTC>TTT>GTT, GTC>ATC>CTC>TTC>TTT>GTT, or CTC>ATC>GTC>TTC>TTT>GTT. It will be understood, therefore, that a CasX variant with a different PAM preference can be utilized in the SIRV constructs, in which case the same principles described above would apply, but the choice of the PAM utilized in the self-inactivating construct would be different. For example, the PAM preference for CasX variant 533 is in the order ATC>CTC>GTC>TTC>TTT>GTT, in a 5′ to 3′ orientation. In such a case, if the PAM sequence of the target nucleic acid was ATC and CasX 533 was utilized in the SIRV construct, the PAM sequence of the self-inactivating segment would be chosen from CTC, GTC, TTC, TTT, or GTT, which are less efficient in promoting the binding and cleavage of the adjacent nucleic acid self-inactivating segment by the RNP. Similarly, in those cases wherein the PAM sequence adjacent to the target nucleic acid of the cell to be modified is GTC and the encoded the CasX variant encoded in the SIRV of the system preferentially binds PAM sequences in the order GTC>ATC>CTC>TTC>TTT>GTT, then the PAM sequence of the one or more self-inactivating segments is selected from the group consisting of ATC, CTC, TTC, TTT, and GTT which are less efficient in promoting the binding and cleavage of the adjacent nucleic acid self-inactivating segment by the RNP. It will be appreciated that so long as a CasX is chosen for incorporation in the SIRV wherein a PAM sequence with a lower binding potential than the PAM sequence of the target nucleic is available, the self-inactivating segment can be appropriately designed with a PAM sequence to confer the desired differential inactivation (e.g., slower rate of binding and/or cleavage) of the resulting construct. It will be further appreciated that the self-inactivating segment sequences of the SIRV can be designed that comprises a sequence that is the complement to the targeting sequence of the gRNA, such that the anti-sense strand of the subsequently formed double-stranded episome would comprise a sequence identical to the targeting sequence with the corresponding PAM and the double-stranded episomal sequence would be cleaved by the RNP of the CasX and gRNA encoded by the SIRV.

[0229] In some embodiments of an SIRV, if the PAM sequence of the target nucleic acid of the cell to be modified is TTC, and the PAM preference of the Class 2 Type V protein is TTC, then the PAM sequence of the one or more self-inactivating segments is selected from the group consisting of ATC, CTC, TTT, GTT, and GTC.

[0230] In some embodiments of an SIRV, if the PAM sequence of the target nucleic acid of the cell to be modified is ATC and the PAM preference of the Class 2 Type V protein is TTC, then the PAM sequence of the one or more self-inactivating segments is selected from the group consisting of CTC, TTT, GTT, and GTC.

[0231] In some embodiments of an SIRV, if the PAM sequence of the target nucleic acid of the cell to be modified is CTC and the PAM preference of the Class 2 Type V protein is TTC, then the PAM sequence of the one or more self-inactivating segments is TTT, GTT, ATC, or GTC.

[0232] In some embodiments of an SIRV, if the PAM sequence of the target nucleic acid of the cell to be modified is ATC and the PAM preference of the Class 2 Type V protein is ATC, then the PAM sequence of the one or more self-inactivating segments is selected from the group consisting of TTC, CTC, TTT, GTT, and GTC.

[0233] In some embodiments of an SIRV, if the PAM sequence of the target nucleic acid of the cell to be modified is CTC and the PAM preference of the Class 2 Type V protein is ATC, then the PAM sequence of the one or more self-inactivating segments is selected from the group consisting of TTC, TTT, GTT, and GTC.

[0234] In some embodiments of an SIRV, if the PAM sequence of the target nucleic acid of the cell to be modified is GTC and the PAM preference of the Class 2 Type V protein is ATC, then the PAM sequence of the one or more self-inactivating segments is TTC, TTT, CTC, or GTT.

[0235] In some embodiments of an SIRV, if the PAM sequence of the target nucleic acid of the cell to be modified is GTC and the PAM preference of the Class 2 Type V protein is GTC, then the PAM sequence of the one or more self-inactivating segments is selected from the group consisting of ATC, CTC, TTT, GTT, and TTC.

[0236] In some embodiments of an SIRV, if the PAM sequence of the target nucleic acid of the cell to be modified is GTC and the PAM preference of the Class 2 Type V protein is ATC, then the PAM sequence of the one or more self-inactivating segments is selected from the group consisting of TTC, TTT, GTT, and CTC.

[0237] In some embodiments of an SIRV, if the PAM sequence of the target nucleic acid of the cell to be modified is CTC and the PAM preference of the Class 2 Type V protein is GTC, then the PAM sequence of the one or more self-inactivating segments is TTC, TTT, ATC, or GTT.

[0238] In some embodiments of an SIRV, if the PAM sequence of the target nucleic acid of the cell to be modified is CTC and the PAM preference of the Class 2 Type V protein is CTC, then the PAM sequence of the one or more self-inactivating segments is selected from the group consisting of ATC, GTC, TTT, GTT, and TTC.

[0239] In some embodiments of an SIRV, if the PAM sequence of the target nucleic acid of the cell to be modified is ATC and the PAM preference of the Class 2 Type V protein is CTC, then the PAM sequence of the one or more self-inactivating segments is selected from the group consisting of GTC, TTT, GTT, and TTC.

[0240] In some embodiments of an SIRV, if the PAM sequence of the target nucleic acid of the cell to be modified is GTC and the PAM preference of the Class 2 Type V protein is CTC, then the PAM sequence of the one or more self-inactivating segments is TTC, TTT, ATC, or GTT.

[0241] In the foregoing embodiments of differential PAM utilization, the cleavage of the self-inactivating segments (in the double-stranded episome) by the RNP is at least about 10%, at least about 20%, at least about 30%, at least about 40%, at least about 50%, at least about 60%, at least about 70%, at least about 80%, or at least about 90% less than the cleavage of the target nucleic acid in a timed in vitro cell-based assay, when assayed under comparable conditions. In some embodiments, the cleavage of the self-inactivating segments (in the double-stranded episome of a cell) by the RNP to achieve 90% cleavage is delayed, relative to the time to achieve 90% editing of a target nucleic acid in a cell, by at least about 1 day, at least about 2 days, at least about 3 days, at least about 4 days, at least about 5 days, at least about 6 days, at least about 7 days, at least about 8 days, or at least about 9 days, when assayed in an in vitro assay under comparable conditions. In other embodiments, when assayed for rate of cleavage, cleavage of the self-inactivating segments by the RNP has a k_{cleave} rate that is at least about 2-fold, at least about 4-fold, at least about 5-fold, at least about 6-fold, at least about 7-fold, at least about 8-fold, at least about 9-fold, or at least about 10-fold less than the k_{cleave} rate of the target nucleic acid in an in vitro cell-based assay, when assayed under comparable conditions. Exemplary assays, as well as constructs utilized to demonstrate these properties are provided in the Examples, below.

b. Self-Limiting Segment with Non-Complementary Bases

[0242] In another designed approach of the SIRV constructs of the present disclosure, the design utilizes a single gRNA and one or more self-inactivating segments in the polynucleotide, wherein the one or more self-inactivating segments of the polynucleotide are capable of being bound and cleaved by the RNP (in the double-stranded episome stage in a cell), but each have between 1 to 5 bases, between 1 to 4 bases, or between 1 to 3 bases that are mismatches and are not complementary to corresponding positions in the targeting sequence of the first gRNA such that the RNP exhibits less efficient binding and cleavage or reduced rate of cleavage of the self-inactivating segment compared to the binding and cleavage of the target nucleic acid. In some embodiments of the foregoing, the base differences of the one or more self-inactivating segments are relative to positions that are 3′ to the fourth nucleotide of the targeting sequence of the gRNA; positions that are more critical for the action of the CRISPR nuclease, such that the binding affinity of the targeting sequence of the guide in the RNP to the self-inactivating segment is reduced compared to the binding affinity of the targeting sequence of the gRNA to the target nucleic acid. A schematic representation of one design of the polynucleotide and the location(s) of the self-inactivating segments is shown in FIG. 45. In another embodiment, the self-inactivating segments of the polynucleotide comprise a sequence that is identical (except for the bases that are mismatched) to that of the targeting sequence of the gRNA such that the anti-sense strand of the episomal form is bound by the RNP. It will be understood that as a result of the base mismatches, the binding and cleavage and/or the rate of cleavage of the self-inactivating segment will be reduced compared to that of the target nucleic acid in, for example, an assay where both sequences are accessible by the RNP. In some embodiments of the design, and, as previously described above, an additional feature that can be utilized is that the PAM sequence utilized in the one or more self-inactivating segments is different from the PAM sequence of the target nucleic acid of the cell to be modified in order to promote less efficient binding and cleavage or cleavage rate of the self-inactivating segment by the RNP compared to the PAM of the target nucleic acid of the cell to be modified.

[0243] In some embodiments, the cleavage of the self-inactivating segments by the RNP with mismatched bases is at least about 10%, at least about 20%, at least about 30%, at least about 40%, at least about 50%, at least about 60%, at least about 70%, at least about 80%, or at least about 90% less than the cleavage of the target nucleic acid by the RNP in a timed in vitro cell-based assay, when assayed under comparable conditions. In some embodiments, the cleavage of the self-inactivating segments (in the double-stranded episome of a cell) by the RNP to achieve 90% cleavage is delayed, relative to the time to achieve 90% editing of a target nucleic acid by the RNP in a cell, by at least about 1 day, at least about 2 days, at least about 3 days, at least about 4 days, at least about 5 days, at least about 6 days, at least about 7 days, at least about 8 days, or at least about 9 days, when assayed in an in vitro assay under comparable conditions. When assayed for rate of cleavage, cleavage of the self-inactivating segments by the RNP has a k_{cleave} rate that is at least about 2-fold, at least about 4-fold, at least about 5-fold, at least about 6-fold, at least about 7-fold, at least about 8-fold, at least about 9-fold, or at least about 10-fold less than the k_{cleave} rate of the target nucleic acid by the RNP in an in vitro cell-based assay, when assayed under comparable conditions. Exemplary assays utilized to demonstrate these properties are provided in the Examples, below. In the embodiments of the foregoing design, the one or more self-inactivating segments can be located within the transgene polynucleotide at the locations previously described, and the CRISPR nuclease, the gRNA, and the regulatory and accessory elements incorporated in the transgene can be selected from the embodiments described herein.

[0244] In some embodiments, the disclosure provides SIRV constructs in which self-limiting segments with non-complementary bases can be combined with the selective use of less-efficient PAM sites described, supra.

c. Second gRNA Specific for Self-Inactivating Segments

[0245] In other design approaches, the SIRV polynucleotides of the present disclosure are designed to encode a second gRNA that specifically targets the self-inactivating segments rather than the target nucleic acid to be modified. An important feature of the design is that the second gRNA comprises a scaffold that is designed to promote equivalent or less efficient binding of the self-inactivating segment compared to the binding and cleavage of the target nucleic acid by an RNP of the Class 2 Type V CRISPR protein and the first gRNA. In some embodiments, the second gRNA scaffold has a sequence identical to that of the first gRNA. In other embodiments, the second gRNA scaffold has a sequence different to that of the first gRNA. In some cases of the foregoing, the SIRV polynucleotide encodes a second guide scaffold comprising a sequence selected from the group consisting of SEQ ID NOS: 2101-2331 and 3992-3995 and encodes a first guide scaffold comprising a sequence selected from SEQ ID NOS: 2276-2296 corresponding to guide variant 215 to 235 as set forth in Table 2, or a sequence with at least 70% sequence identity thereto. In a particular embodiment, the SIRV polynucleotide encodes a second guide scaffold comprising the sequence of SEQ ID NO: 2238 (guide scaffold 174) and encodes a first guide scaffold comprising the sequence of SEQ ID NO: 2296 (guide scaffold 235). In another particular embodiment, the SIRV polynucleotide encodes a second guide scaffold comprising the sequence of SEQ ID NO: 2238 (guide scaffold 174), or a sequence with at least 70% sequence identity thereto, and encodes a first guide scaffold comprising the sequence of SEQ ID NO: 4028 (guide scaffold 316), or a sequence with at least 70% sequence identity thereto.

[0246] The differential activity of the gRNA on the ability of the nuclease-gRNA complex to edit nucleic acids is demonstrated in the Examples, where constructs with guide scaffolds 231-236 (SEQ ID NOS: 2288-2293) edited at a higher level compared to constructs with guide 174 (SEQ ID NO: 2238). A schematic representation of one design of the polynucleotide and the location(s) of the self-inactivating segments is shown in FIG. 46. It will be understood that because the binding and cleavage or cleavage rate of the RNP targeting the self-inactivating segment is less efficient compared to that of the target nucleic acid, there is a temporal difference between the timing of cleavage and/or a reduced rate of cleavage compared to an RNP comprising the first gRNA targeting the target nucleic acid of the cell.

[0247] In some embodiments of the foregoing alternative designs, the disclosure provides SIRV comprising a polynucleotide comprising sequences for components selected from i) a packaging component; ii) a sequence encoding a Class 2 CRISPR protein; iii) a first promoter operably linked to the sequence encoding the Class 2 CRISPR protein; iv) a sequence encoding a first guide RNA (gRNA) comprising a targeting sequence that is complementary to a target nucleic acid of a cell to be modified; v) a second promoter sequence operably linked to the sequence encoding the first gRNA; vi) a sequence encoding a second gRNA having a scaffold sequence identical to the scaffold sequence of the first gRNA and having a targeting sequence that has a lower binding affinity to one or more self-limited segments utilized in the polynucleotide compared to the binding affinity of the targeting sequence of the first gRNA to the target nucleic acid of the cell to be modified; vii) a sequence encoding a second gRNA having a scaffold sequence different from the scaffold sequence of the first gRNA and having a targeting sequence that is complementary to one or more self-limited segments utilized in the polynucleotide, wherein the second gRNA promotes editing and/or cleavage by an RNP of the Class 2 CRISPR protein and the second gRNA that is equal to or less efficient compared to an RNP of the Class 2 CRISPR protein and the first gRNA; viii) a third promoter sequence operably linked to the sequence encoding the second gRNA; and ix) one or more self-inactivating segments of the polynucleotide comprising a protospacer adjacent motif (PAM) sequence and a polynucleotide sequence capable of being bound and cleaved by a ribonuclear protein complex (RNP) of the Class 2 CRISPR protein and the second gRNA. The location of the self-limiting segments in the transgene can be at locations previously described. In the embodiments of these foregoing designs, the cleavage of the self-inactivating segments (in the double-stranded episome of a cell) by the RNP comprising the second gRNA is at least about 10%, at least about 20%, at least about 30%, at least about 40%, at least about 50%, at least about 60%, at least about 70%, at least about 80%, or at least about 90% less than the cleavage of the target nucleic acid by the RNP comprising the first gRNA in a timed in vitro cell-based assay, when assayed under comparable conditions. In some embodiments, the cleavage of the self-inactivating segments by the RNP comprising the second gRNA to achieve 90% cleavage is delayed, relative to the time to achieve 90% editing of a target nucleic acid by the RNP comprising the first gRNA in a cell, by at least about 1 day, at least about 2 days, at least about 3 days, at least about 4 days, at least about 5 days, at least about 6 days, at least about 7 days, at least about 8 days, or at least about 9 days, when assayed in an in vitro assay under comparable conditions. When assayed for rate of cleavage, cleavage of the self-inactivating segments by the RNP by the RNP comprising the second gRNA has a k_{cleave} rate that is at least about 2-fold, at least about 4-fold, at least about 5-fold, at least about 6-fold, at least about 7-fold, at least about 8-fold, at least about 9-fold, or at least about 10-fold less than the k_{cleave} rate of the target nucleic acid by the RNP comprising the first gRNA in an in vitro cell-based assay, when assayed under comparable conditions. Exemplary assays utilized to demonstrate these properties are provided in the Examples, below. In the embodiments of the foregoing design, the one or more self-inactivating segments can be located within the transgene polynucleotide at the locations previously described, and the CRISPR nuclease, the gRNA, and the regulatory and accessory elements incorporated in the transgene can be selected from the embodiments described herein.

d. Second gRNA and Less-Efficient Promoter for Self-Inactivating Segments

[0248] In another design approach, the polynucleotide of the SIRV of the present disclosure is designed to encode a second gRNA that specifically targets the incorporated self-inactivating segments wherein the second gRNA is under the control of a third, less efficient pol III promoter compared to the second promoter controlling the first gRNA. It will be understood that because the third promoter is less efficient at initiating transcription of the second gRNA, the expression of the second gRNA is delayed or is reduced compared to the first gRNA such that the target nucleic acid of the cells can be modified by the RNP of the nuclease and the first gRNA before the polynucleotide of the SIRV is inactivated by the RNP of the second gRNA and nuclease. In some embodiments, the third promoter is selected from the group consisting of truncated U6, sequence variants of U6, mini U6, truncated 7SK, sequence variants of 7SK, truncated H1, sequence variants of H1, bidirectional H1, bidirectional U6, bidirectional 7SK, and bidirectional U6, 5S promoter, and Adenovirus 2 (Ad2) VAI promoter and truncated or sequence variants thereof. Native U6, 7SK and H1 are generally considered strong promoters and would, therefore, be appropriate for use with the first gRNA targeting the target nucleic acid. Representative examples of promoters contemplated for use as the third promoter include, but are not limited to, the sequences of SEQ ID NOS: 494-513 and 2688-2708 as set forth in Table 25, and sequences having at least about 80%, at least about 90%, or at least about 95%, or at least about 95%, or at least about 96%, or at least about 97%, or at least about 98%, or at least about 99% sequence identity thereto. In some embodiments, the scaffold of the second gRNA is identical to that of the first gRNA. In other embodiments, the scaffold of the second gRNA is different and is less efficient compared to the first gRNA; e.g., gRNA 174 (SEQ ID NO: 2238) is less efficient compared to gRNA 235 (SEQ ID NO: 2296). In some embodiments, the SIRV polynucleotide encodes a second guide scaffold comprising a sequence selected from the group consisting of SEQ ID NO: 2101-2238 and 3992-3995 and encodes a first guide scaffold comprising a sequence selected from SEQ ID NOS: 2276-2296 corresponding to guide variant scaffolds 215 to 235. In a particular embodiment, the SIRV polynucleotide encodes a second guide scaffold comprising the sequence of guide scaffold 174 (SEQ ID NO: 2238) and encodes a first guide scaffold comprising the sequence of guide scaffold 235 (SEQ ID NO: 2296). A schematic representation of one design of the polynucleotide and the locations of the self-inactivating segments is shown in FIG. 47. In the embodiments of the design, the cleavage of the self-inactivating segments by the RNP comprising the second gRNA is at least about 10%, at least about 20%, at least about 30%, at least about 40%, at least about 50%, at least about 60%, at least about 70%, at least about 80%, or at least about 90% less than the cleavage of the target nucleic acid by the RNP comprising the first gRNA in a timed in vitro cell-based assay, when assayed under comparable conditions. In some embodiments, the cleavage of the self-inactivating segments (in the double-stranded episome of a cell) by the RNP to achieve 90% cleavage is delayed, relative to the time to achieve 90% editing of a target nucleic acid in a transduced or transfected cell, by at least about 1 day, at least about 2 days, at least about 3 days, at least about 4 days, at least about 5 days, at least about 6 days, at least about 7 days, at least about 8 days, or at least about 9 days, when assayed in an in vitro assay under comparable conditions. When assayed for rate of cleavage, cleavage of the self-inactivating segments by the RNP has a k_{cleave} rate that is at least about 2-fold, at least about 4-fold, at least about 5-fold, at least about 6-fold, at least about 7-fold, at least about 8-fold, at least about 9-fold, or at least about 10-fold less than the k_{cleave} rate of the target nucleic acid in an in vitro cell-based assay, when assayed under comparable conditions. Exemplary assays utilized to demonstrate these properties are provided in the Examples, below. In the embodiments of the foregoing design, the one or more self-inactivating segments can be located within the transgene polynucleotide at the locations previously described, and the CRISPR nuclease, the gRNA, and the regulatory and accessory elements incorporated in the transgene can be selected from the embodiments described herein.

[0249] In some embodiments of the foregoing design, the disclosure provides SIRV compositions comprising a polynucleotide comprising sequences for components selected from the group consisting of: i) a packaging component; ii) a sequence encoding a Class 2 CRISPR protein; iii) a first promoter operably linked to the sequence encoding the Class 2 CRISPR protein; iv) a sequence encoding a first guide RNA (gRNA) scaffold and a targeting sequence that is complementary to a target nucleic acid of a cell to be modified; v) a second promoter sequence operably linked to the sequence encoding the first gRNA; vi) a sequence encoding a second guide RNA (gRNA) having a targeting sequence different from the targeting sequence of the first gRNA; vii) a third promoter sequence operably linked to the sequence encoding the second gRNA, wherein the third promoter has a sequence different from the sequence of the second promoter; and viii) one or more self-inactivating segments of the polynucleotide comprising a protospacer adjacent motif (PAM) sequence and a polynucleotide sequence capable of being bound and cleaved by a ribonuclear protein complex (RNP) of the Class 2 CRISPR protein and the second gRNA.

e. Combinations of SIRV Designs

[0250] In some cases, the alternative designs of the SIRV can be combined to further enhance or tailor the degree or onset of inactivation of the expressed CRISPR components in the cell. As detailed, supra, four of the SIRV design approaches (summarized in a general, non-limiting way) are: 1) use of alternative, less efficient PAM sites adjacent to the self-inactivating segment; 2) use of non-complementary bases in the self-inactivating segment (relative to the targeting sequence of the gRNA); 3) incorporation of a second gRNA in the SIRV with a different, less-efficient scaffold or having an identical scaffold but use of a targeting sequence with lower affinity to the self-inactivating segment compared to the first gRNA targeting the target nucleic acid; and 4) incorporation of a second gRNA in the SIRV with a different, less-efficient promoter compared to the promoter of the first gRNA targeting the target nucleic acid. The disclosure contemplates SIRV designs using any and all combinations of the foregoing. In some embodiments, a SIRV construct design incorporates use of an alternative, less efficient PAM sites adjacent to the self-inactivating segment in combination with non-complementary bases in the self-inactivating segment (design #1 and #2). In other embodiments, a SIRV construct design incorporates use of an alternative, less efficient PAM sites adjacent to the self-inactivating segment in combination with a second gRNA in the SIRV with a different, less-efficient scaffold or having an identical scaffold but use of a targeting sequence with lower affinity to the self-inactivating segment (design #1 and #3). In other embodiments, a SIRV construct design incorporates use of an alternative, less efficient PAM site adjacent to the self-inactivating segment in combination with a second gRNA in the SIRV with a different, less-efficient promoter compared to the promoter of the first gRNA (design #1 and #4). In other embodiments, a SIRV construct design incorporates use of non-complementary bases in the self-inactivating segment in combination with a different, less-efficient scaffold or having an identical scaffold but use of a targeting sequence with lower affinity to the self-inactivating segment (design #2 and #3). In other embodiments, a SIRV construct design incorporates use of non-complementary bases in the self-inactivating segment in combination with a second gRNA in the SIRV with a different, less-efficient promoter compared to the promoter of the first gRNA (design #2 and #4). In other embodiments, a SIRV construct design incorporates a second gRNA in the SIRV with a different, less-efficient scaffold or having an identical scaffold but use of a targeting sequence with lower affinity to the self-inactivating segment in combination with a second gRNA in the SIRV with a different, less-efficient promoter compared to the promoter of the first gRNA (design #3 and #4). In other embodiments, a SIRV construct design incorporates three of the foregoing designs in any combination; e.g., #1, #2, and #3, or #2, #3, and #4, or #1, #3, and #4. In still other embodiments, a SIRV construct design incorporates four of the foregoing designs. It will be appreciated by one of skill in the art that by using constructs having multiple designs, the degree or onset of inactivation of the expressed CRISPR components can be tailored to achieve the desired outcome of the desired modification of the target nucleic acid and inactivation of the SIRV.

III. Use of Class 2 Type V CRISPR to Permit Inclusion of Additional Components in the SIRV and siAAV Transgene

[0251] Provided herein are Class 2 Type V systems, which due to their smaller size, permit the inclusion of additional sequence space in an SIRV transgene. These SIRV can be delivered to cells by transduction and used in the making and packaging of self-inactivating AAV (siAAV) particles.

[0252] Wild-type AAV is a small, single-stranded replication-defective DNA virus belonging to the parvovirus family. The wild-type AAV genome is made up of two genes that encode four replication proteins and three capsid proteins, respectively, and is flanked on either side by inverted terminal repeats (ITRs) having 130-145 nucleotides that fold into a hairpin shape important for replication. The virion is composed of three capsid proteins, Vp1, Vp2, and Vp3, produced in a 1:1:10 ratio from the same open reading frame but from differential splicing (Vp1) and alternative translational start sites (Vp2 and Vp3, respectively). The cap gene produces an additional, non-structural protein called the Assembly-Activating Protein (AAP). This protein is produced from ORF2 and is essential for the capsid-assembly process. The capsid forms a supramolecular assembly of approximately 60 individual capsid protein subunits into a non-enveloped, T-1 icosahedral lattice capable of protecting the AAV genome.

[0253] Wild-type AAV is capable of transducing nearly every cell type in the human body. Typically, when producing a recombinant AAV vector, the sequence between the two ITRs is replaced with one or more sequences of interest (e.g., a transgene), and the Rep and Cap sequences are provided in trans, making the ITRs the only viral DNA that remains in the vector. The resulting recombinant AAV vector genome construct comprises two cis-acting 130 to 145-nucleotide ITRs flanking an expression cassette encoding the transgene sequences of interest, providing at least 4.7 kb or more for packaging of foreign DNA that can include a transgene, one or more promoters and accessory elements, such that the total size of the vector is below 5 to 5.2 kb, which is compatible with packaging within the AAV capsid (it being understood that as the size of the construct exceeds this threshold, the packaging efficiency of the vector decreases). The transgene may be used to correct or ameliorate gene deficiencies in the cells of a subject. However, in the context of CRISPR-mediated gene editing, the size limitation of the expression cassette is a challenge for most CRISPR systems due to the size of the nucleases.

[0254] As provided herein, the smaller Class 2, Type V proteins, and gRNA contemplated for inclusion in the vector, permits inclusion of additional or larger components that can be packaged into a self-inactivating AAV (siAAV) or other viral particle. In some embodiments, the disclosure provides an siAAV comprising components of a Class 2 Type V CRISPR system. In some embodiments, the Class 2 CRISPR protein of the siAAV comprises a Type V protein selected from the group consisting of Cas12a (Cpf1), Cas12b (C2c1), Cas12c (C2c3), Cas12d (CasY), Cas12e (CasX), Cas12f, Cas12g, Cas12h, Cas12i, Cas12j, Cas12k, Cas14, and Cas(D, and the associated guide RNA of the respective system. In a particular embodiment, the CRISPR protein is a CasX, wherein the CasX comprises a sequence selected from the group consisting of SEQ ID NOS: 1-3, 49-321 and 2356-2488, or a sequence having at least about 85%, at least about 90%, at least about 91%, at least about 92%, at least about 93%, at least about 94%, at least about 95%, at least about 96%, at least about 97%, at least about 98%, or at least about 99% sequence identity thereto. In some embodiments, the siAAV transgene comprises a first gRNA and, in some cases, a second gRNA comprising a scaffold sequence selected from the group consisting of SEQ ID NOS: 2101-2331 and 3992-3995, or a sequence having at least 85%, at least 90%, at least 95%, at least 95%, at least 96%, at least 97%, at least 98% identity thereto. In the foregoing embodiments, the gRNA further comprises a targeting sequence, wherein the targeting sequence has at least 15 to 30 nucleotides. The CasX protein and gRNA component embodiments contemplated for incorporation into the siAAV vectors of the disclosure are described more fully, below.

[0255] The smaller size of the Class 2, Type V proteins and gRNA contemplated for inclusion in the vector constructs permit inclusion of additional or larger components that can be packaged into a single viral particle, such as an siAAV. The AAV components of the siAAV of the disclosure may be created using AAV capsids and ITR derived from any of several AAV serotypes, including without limitation, AAV1, AAV2, AAV3, AAV4, AAV5, AAV6, AAV7, AAV8, AAV9, AAV10, AAV11, AAV12, AAV 44.9, AAV 9.45, AAV 9.61, AAV-Rh74, and AAVRh10, and modified capsids of these serotypes. In some embodiments, the AAV capsids utilized for the siAAV of the disclosure may be tissue-specific. In some embodiments, the siAAV capsid is of serotype 9 or of serotype 6, e.g., to target motor neurons and glia of the spinal cord. In some embodiments, the methods provide use of AAV9 or AAV6 for targeting of neurons via intraparenchymal brain injection. In some embodiments, the siAAV vector is derived from AAV9, e.g., delivered intravenously to penetrate the blood-brain barrier, and to drive gene expression in the nervous system via both neuronal and glial tropism of the vector. In other embodiments, the siAAV vector is derived from serotype 8, e.g., to deliver polynucleotides to retinal cells, liver, skeletal muscle and/or the heart. In other embodiments, the siAAV vector is derived from AAV serotype 2, e.g., to deliver polynucleotides to skeletal muscle, neurons, vascular smooth muscle cells, and/or hepatocytes. In other embodiments, the siAAV vector is derived from AAV-Rh10, e.g., to deliver polynucleotides to the CNS, lung, liver, muscle cells, and/or the heart. In some embodiments, an siAAV intended for use in muscle may comprise an AAV capsid of MyoAAV 1A1, MyoAAV 1A2, or MyoAAV 2A.

[0256] In some embodiments, the encoded CRISPR nuclease and gRNA sequences of the transgene incorporated into the siAAV are less than about 3100, about 3090, about 3080, about 3070, about 3060, about 3050, or less than about 3040 nucleotides in length. In other embodiments, the encoded CRISPR nuclease and gRNA sequences of the transgene incorporated into the siAAV are less than about 3040 to about 3100 nucleotides in length. Thus, in light of the total length of the expression cassette that can be packaged into an siAAV particle, in some embodiments, the polynucleotide sequences of the first promoter and the at least one accessory element have greater than at least about 1300, at least about 1350, at least about 1360, at least about 1370, at least about 1380, at least about 1390, at least about 1400, at least about 1500, at least about 1600 nucleotides, at least 1650, at least about 1700, at least about 1750, at least about 1800, at least about 1850, or at least about 1900 nucleotides in combined length. In other embodiments, the polynucleotide sequences of the first promoter and the at least one accessory element for incorporation into an SIRV for packaging into an siAAV have greater than at least about 1300 to at least about 1900 nucleotides in combined length. In one embodiment, the polynucleotide sequences of the first promoter and the at least one accessory element for incorporation into an SIRV for packaging into an siAAV have greater than 1314 nucleotides in combined length. In another embodiment, the polynucleotide sequences of the first promoter and the at least one accessory element for incorporation into the SIRV of an siAAV have greater than 1381 nucleotides in combined length. In other embodiments, the polynucleotide sequences of the first promoter, the second promoter and the at least one accessory element for incorporation into the SIRV for packaging into an siAAV have greater than at least about 1300, at least about 1350, at least about 1360, at least about 1370, at least about 1380, at least about 1390, at least about 1400, at least about 1500, at least about 1600 nucleotides, at least 1650, at least about 1700, at least about 1750, at least about 1800, at least about 1850, or at least about 1900 nucleotides in combined length. In other embodiments, the polynucleotide sequences of the first promoter, the second promoter and the at least one accessory element for incorporation into the SIRV for packaging into an siAAV have greater than at least about 1300 to at least about 1900 nucleotides in combined length. In other embodiments, the polynucleotide sequences of the first promoter, the second promoter, the third promoter and the at least one accessory element for incorporation into the SIRV for packaging into an siAAV have greater than at least about 1300 to at least about 1900 nucleotides in combined length. In one embodiment, the polynucleotide sequences of the first promoter, the second promoter, the third promoter and the at least one accessory element for incorporation into the SIRV for packaging into an siAAV have greater than 1314 nucleotides in combined length. In another embodiment, the polynucleotide sequences of the first promoter, the second promoter, the third promoter and the at least one accessory element for incorporation into the SIRV for packaging into an siAAV have greater than 1381 nucleotides in combined length. In still other embodiments, the polynucleotide sequences of the first promoter, the second promoter, and the two or more accessory elements for incorporation into the SIRV for packaging into an siAAV have greater than at least about 1300, at least about 1350, at least about 1360, at least about 1370, at least about 1380, at least about 1390, at least about 1400, at least about 1500, at least about 1600 nucleotides, at least 1650, at least about 1700, at least about 1750, at least about 1800, at least about 1850, or at least about 1900 nucleotides in combined length. In other embodiments, the polynucleotide sequences of the first promoter, the second promoter, and the two or more accessory elements for incorporation into the SIRV for packaging into an siAAV have greater than at least about 1300 to at least about 1900 nucleotides in combined length. In one embodiment, the polynucleotide sequences of the first promoter, the second promoter, and the two or more accessory elements for incorporation into the SIRV for packaging into an siAAV have greater than 1314 nucleotides in combined length. In another embodiment, the polynucleotide sequences of the first promoter, the second promoter, and the two or more accessory elements for incorporation into the SIRV for packaging into an siAAV have greater than 1381 nucleotides in combined length. In still other embodiments, the polynucleotide sequences of the first promoter, the second promoter, the third promoter, and the two or more accessory elements for incorporation into the SIRV for packaging into an siAAV have greater than at least about 1300, at least about 1350, at least about 1360, at least about 1370, at least about 1380, at least about 1390, at least about 1400, at least about 1500, at least about 1600 nucleotides, at least 1650, at least about 1700, at least about 1750, at least about 1800, at least about 1850, or at least about 1900 nucleotides in combined length. In other embodiments, the polynucleotide sequences of the first promoter, the second promoter, the third promoter, and the two or more accessory elements for incorporation into the SIRV for packaging into an siAAV have greater than at least about 1300 to at least about 1900 nucleotides in combined length. In one embodiment, the polynucleotide sequences of the first promoter, the second promoter, the third promoter, and the two or more accessory elements for incorporation into the SIRV for packaging into an siAAV have greater than 1314 nucleotides in combined length. In another embodiment, the polynucleotide sequences of the first promoter, the second promoter, the third promoter, and the two or more accessory elements for incorporation into the SIRV for packaging into an siAAV have greater than 1381 nucleotides in combined length.

[0257] In some embodiments, the present disclosure provides a polynucleotide for use in the SIRV comprising a first adeno-associated virus (AAV) inverted terminal repeat (ITR) sequence, a second AAV ITR sequence, a first promoter sequence, a sequence encoding an SIRV, which comprises a CRISPR protein, a second promoter, a sequence encoding at least a first guide RNA (gRNA), one or more self-inactivating sequences, and one or more accessory element sequences, wherein at least 25%, 26%, 27%, 28%, 29%, 30%, 31%, 32%, 33%, 34%, or 35% or more of the nucleotides of the polynucleotide sequence comprise the first and second promoters, one or more self-inactivating sequences, and the one or more accessory element sequences in combined length. As detailed in the Examples, it has been discovered that the ability to devote more of the total polynucleotide of the expression cassette to the promoters, a second gRNA, and/or the accessory elements results in enhanced expression of and/or performance of the CRISPR protein and gRNA, when expressed in the target host cell; either in an in vitro assay or in vivo in a subject. In some embodiments, the use of alternative or longer promoters and/or accessory elements (e.g., poly(A) signals, NLS, a second gRNA, and/or post-transcriptional regulatory elements) in the SIRV polynucleotides and resulting siAAV vectors results in an increase in editing of a target nucleic acid of at least about 10%, at least about 20%, at least about 30%, at least about 40%, at least about 50%, at least about 60%, at least about 70%, at least about 80%, at least about 90%, at least about 100%, at least about 150%, at least about 200%, or at least about 300% in a timed in vitro assay compared to a construct not having the alternative or longer promoters and/or accessory elements. In one embodiment, the first promoter sequence for incorporation into the SIRV for packaging into an siAAV has at least about 200, at least about 300, at least about 400, at least about 500, at least about 600, at least about 700, or at least about 800 nucleotides. In another embodiment, the second promoter sequence for incorporation into the SIRV for packaging into an siAAV has at least about 200, at least about 300, at least about 400, at least about 500, at least about 600, at least about 700, or at least about 800 nucleotides. In another embodiment, the third promoter sequence for incorporation into the SIRV for packaging into an siAAV has at least about 200, at least about 300, at least about 400, at least about 500, at least about 600, at least about 700, or at least about 800 nucleotides. Representative examples of promoters contemplated for incorporation into the polynucleotide include, but are not limited to the sequences of SEQ ID NOS: 425-431 463-513, and 2688-2708 as set forth in Tables 8, 10, 11, 25, 54, 55, 57, 58. Embodiments of the promoters are described more fully, below.

[0258] Due to the smaller size of the CRISPR and regulatory elements utilized in the designs of the SIRV and siAAV, additional components can be incorporated into the transgene to assist in the expression of CRISPR components. In some embodiments, the transgene of the SIRV and siAAV can further comprise one or more accessory elements selected from the group consisting of a poly(A) signal, a gene enhancer element, an intron, a posttranscriptional regulatory element, a nuclear localization signal (NLS), a deaminase, a DNA glycosylase inhibitor, a stimulator of CRISPR-mediated homology-directed repair, and an activator or repressor of transcription. Representative, non-limiting examples of sequences encoding CRISPR proteins (SEQ ID NOS: 747-761, as set forth in Table 63), encoding gRNA (SEQ ID NOS: 462 and 682-710 as set forth in Table 26), promoters (SEQ ID NOS: 425-43, 463-513, and 2688-2708 as set forth in Tables 8, 10, 11, and 25), poly(A) signal sequences (SEQ ID NOS: 514-523 and 2710-2859 as set forth in Tables 12 and 14, and SEQ ID NOS: 2991-3991), PTRE (SEQ ID NOS: 524-526 as set forth in Table 18), enhancers linked to core promoters (SEQ ID NOS: 527-535 as set forth in Table 19), encoded NLS (SEQ ID NOS: 538-587, 599-610, 613, 771-772, 844-846, and 2498-2591 as set forth in Tables 7, 22 and 23), and introns (SEQ ID NOS: 614-658 as set forth in Table 24) suitable for incorporation into the SIRV constructs of the disclosure are presented herein. In some cases, the PTRE is selected from the group consisting of cytomegalovirus immediate/early intronA, hepatitis B virus PRE (HPRE), Woodchuck Hepatitis virus PRE (WPRE), and 5′ untranslated region (UTR) of human heat shock protein 70 mRNA (Hsp70). In some embodiments, the present disclosure provides a polynucleotide for promoters and accessory elements for use in the making of an siAAV vector, wherein the polynucleotide comprises one or more sequences selected from the group of sequences of SEQ ID NOS: 425-431, 463-513-535, 2688-2708, 2710-2859, and 2991-3991, as set forth in Tables 8, 10-12, 14, -18-19, and 25 or a sequence having at least 85%, at least 90%, at least 95%, at least 95%, at least 96%, at least 97%, at least 98%, or at least 99% identity thereto. In another embodiment, the present disclosure provides a polynucleotide for promoters and accessory elements for use in the making of an siAAV vector, wherein the polynucleotide comprises one or more sequence selected from the group of SEQ ID NOS: 425-431, 463-513-535, 2688-2708, 2710-2859, and 2991-3991, set forth in Tables 8, 10-12, 14, 18-19, and 25. It has been discovered that the inclusion of the accessory element(s) in the polynucleotide of the SIRV construct and the transgene of the siAAV can enhance the expression, binding, activity, or performance of the CRISPR protein as compared to the CRISPR protein in the absence of said accessory element in the construct. In one embodiment, the inclusion of the one or more accessory elements in the construct results in an increase in editing of a target nucleic acid by the expressed CRISPR protein in a timed in vitro assay of at least about 10%, at least about 20%, at least about 30%, at least about 40%, at least about 50%, at least about 60%, at least about 70%, at least about 80%, at least about 90%, at least about 100%, at least about 1500%, at least about 200%, or at least about 300% as compared to the CRISPR protein in the absence of said accessory element in the construct.

IV. Guide Nucleic Acids of the SIRV and siAAV Systems

[0259] In another aspect, the disclosure relates to guide nucleic acids (gRNA) utilized in the SIRV and siAAV systems that have utility in genome editing or modification of a target nucleic acid in a cell, as well as the inactivation of the constructs. In the case of editing of a target nucleic acid in a cell, the present disclosure provides specifically-designed guide nucleic acids (“gRNAs”) with targeting sequences that are complementary to (and are therefore able to hybridize with) the target nucleic acid as a component of the gene-editing SIRV and siAAV systems, wherein the gRNA is capable of forming a ribonucleoprotein (RNP) complex with a Type V CRISPR nuclease protein, such as a CasX. It is envisioned that in some embodiments, multiple gRNAs are delivered in the SIRV and siAAV systems for the modification of a target nucleic acid. For example, a pair of gRNAs with targeting sequences to different or overlapping regions of the target nucleic acid sequence can be used in order to bind and cleave at two different or overlapping sites within the gene, which is then edited by non-homologous end joining (NHEJ), homology-directed repair (HDR), homology-independent targeted integration (HITI), micro-homology mediated end joining (MMEJ), single strand annealing (SSA) or base excision repair (BER). In the case of inactivation of the SIRV polynucleotide, the present disclosure provides specifically-designed guide nucleic acids (“gRNAs”) with targeting sequences that are complementary to (and are therefore able to hybridize with) the self-inactivating segment(s) in the polynucleotide utilized in the SIRV and siAAV particles, wherein an RNP of the CasX and the gRNA is able to bind and cleave the self-inactivating segment of the double-stranded episome in the target cell.

a. Reference gRNA and gRNA Variants

[0260] In some embodiments, the present disclosure provides guide nucleic acids capable of forming a RNP complex with CRISPR nuclease protein for use in the SIRV and siAAV in which the gRNA binds to the CRISPR nuclease protein, and wherein the targeting sequence (or spacer, described more fully, below) of the gRNA is complementary to, and therefore is capable of hybridizing with the target nucleic acid sequence. In some embodiments, the same gRNA is utilized to hybridize with the self-inactivating segment(s). In other embodiments, a second gRNA is incorporated into the polynucleotide construct with an encoded targeting sequence that, when the gRNA is expressed, is complementary to (and are therefore able to hybridize with) the self-inactivating segment(s) of the nucleic acid, leading to cleavage of the self-inactivating segment(s). In some embodiments, the gRNA is a ribonucleic acid molecule (“gRNA”). In some embodiments, the gRNA is a chimera, and comprises both DNA and RNA.

[0261] In some embodiments, a gRNA of the present disclosure comprises a sequence of a naturally-occurring gRNA (a “reference gRNA”) that is subjected to one or more mutagenesis methods, such as the mutagenesis methods described herein, which may include Deep Mutational Evolution (DME), deep mutational scanning (DMS), error prone PCR, cassette mutagenesis, random mutagenesis, staggered extension PCR, gene shuffling, or domain swapping, in order to generate one or more gRNA variants with enhanced or varied properties relative to the reference gRNA. The activity of reference gRNAs may be used as a benchmark against which the activity of gRNA variants are compared, thereby measuring improvements in function or other characteristics of the gRNA variants. In other embodiments, a reference gRNA may be subjected to one or more deliberate, targeted mutations in order to produce a gRNA variant, for example a rationally designed variant. As used herein, the term gRNA covers naturally-occurring molecules, as well as sequence variants.

[0262] The gRNAs of the disclosure comprise two segments; a targeting sequence and a protein-binding segment. The targeting segment of a gRNA includes a nucleotide sequence (referred to interchangeably as a guide sequence, a spacer, a targeter, or a targeting sequence) that is complementary to (and therefore hybridizes with) a specific sequence (a target site) within the target nucleic acid sequence (e.g., a target ssRNA, a target ssDNA, a strand of a double stranded target DNA, etc.), described more fully below. The targeting sequence of a gRNA is capable of binding to a target nucleic acid sequence, including a coding sequence, a complement of a coding sequence, a non-coding sequence, and to accessory elements. The protein-binding segment (or “activator” or “protein-binding sequence”) interacts with (e.g., binds to) a CasX protein as a complex, forming an RNP (described more fully, below). The protein-binding segment is alternatively referred to herein as a “scaffold”, which is comprised of several regions, described more fully, below.

[0263] Once expressed in the cell, a gRNA and a nuclease protein encoded in the SIRV or siAAV systems of the disclosure can form a complex and bind via non-covalent interactions into a complex, e.g., a ribonuclear protein complex (RNP). The gRNA can provide target specificity to the complex by including a targeting sequence having a nucleotide sequence that is complementary to a sequence of a target nucleic acid and/or to the self-inactivating segment. The guide targeting sequence linked 3′ to the scaffold is sometimes referred to herein as the “spacer” or “spacer sequence” or “guide” or “targeting sequence” or “targeting region” of the gRNA. The CRISPR nuclease protein of the complex can provide the site-specific activities of the complex such as cleavage of the target nucleic acid sequence or the self-inactivating segment and/or an activity provided by the fusion partner in the case of a chimeric CRISPR nuclease protein.

[0264] Collectively, the assembled gRNAs of the disclosure, including all gRNA variants, comprise distinct structured regions, or domains: the RNA triplex, the scaffold stem loop, the extended stem loop, the pseudoknot, and the targeting sequence that, in the embodiments of the disclosure is specific for a target nucleic acid and is located on the 3′end of the gRNA. The RNA triplex, the scaffold stem loop, the pseudoknot and the extended stem loop, together with the unstructured triplex loop that bridges portions of the triplex, together, are referred to as the “scaffold” of the gRNA. Each of the structured domains are critical to establish the global RNA fold of the guide and retain functionality of the guide; particularly the ability to properly complex with the CasX nuclease. For example, the guide scaffold stem interacts with the helical I domain of CasX nuclease, while residues within the triplex, triplex loop, and pseudoknot stem interact with the OBD of the CasX nuclease. Together, these interactions confer the ability of the guide to bind and form an RNP with the CasX that retains stability, while the spacer (or targeting sequence) directs and defines the specificity of the RNP for binding a specific sequence of DNA. The individual domains are described more fully, below.

b. RNA Triplex and Pseudoknot

[0265] In some embodiments of the guide RNAs provided herein (including reference gRNAs) for use in the SIRV and siAAV of the disclosure, there is a RNA triplex, and the RNA triplex comprises the sequence of a UUU--nX(˜4-15)--UUU (SEQ ID NO: 20) stem loop that ends with an AAAG after 2 intervening stem loops (the scaffold stem loop and the extended stem loop), forming a pseudoknot that may also extend past the triplex into a duplex pseudoknot. The UU-UUU-AAA sequence of the triplex forms as a nexus between the targeting sequence, scaffold stem, and extended stem. In exemplary CasX gRNAs, the UUU-loop-UUU region is coded for first, then the scaffold stem loop, and then the extended stem loop, which is linked by the tetraloop, and then an AAAG closes off the triplex before becoming the targeting sequence. The triplex, triplex loop, and pseudoknot stem interact with the OBD of the CasX nuclease. Together, these interactions define RNP binding and stability of the complex.

c. Scaffold Stem Loop

[0266] In some embodiments of CasX gRNAs for use in the SIRV and siAAV of the disclosure, the triplex region is followed by the scaffold stem loop. The scaffold stem loop is a region of the gRNA that is bound by CasX protein (such as a CasX variant protein). In some embodiments, the scaffold stem loop is a fairly short and stable stem loop. In some cases, the scaffold stem loop does not tolerate many changes, and requires some form of an RNA bubble. The scaffold stem is necessary for CasX gRNA function as it interacts with the helical I domain of the CasX. While it is perhaps analogous to the nexus stem of Cas9 as being a critical stem loop, the scaffold stem of a CasX gRNA, in some embodiments, has a necessary bulge (RNA bubble) that is different from many other stem loops found in CRISPR/Cas systems. In some embodiments, the presence of this bulge is conserved across gRNA that interact with different CasX proteins.

d. Extended Stem Loop

[0267] In some embodiments of the CasX gRNAs for use in the SIRV and siAAV of the disclosure, the scaffold stem loop is followed by the extended stem loop. In some embodiments, the extended stem comprises a synthetic tracr and crRNA fusion that is largely unbound by the CasX protein. In some embodiments, the extended stem loop can be highly malleable. In some embodiments, a single guide gRNA is made with a GAAA tetraloop linker or a GAGAAA linker between the tracr and crRNA in the extended stem loop. In some cases, the targeter and activator of a CasX gRNA are linked to one another by intervening nucleotides and the linker can have a length of from 3 to 20 nucleotides. In some embodiments of the CasX gRNAs of the disclosure, the extended stem is a large 32-bp loop that sits outside of the CasX protein in the ribonucleoprotein complex. In some embodiments, the extended stem loop comprises a GAGAAA linker sequence. In some embodiments, the extended stem loop is modified by insertion of C at position 64 and the A88G substitution relative to the sequence of SEQ ID NO: 2296, which resolves an asymmetrical bulge element of the extended stem, enhancing the stability of the extended stem of the gRNA scaffold.

[0268] In some embodiments, the gRNA comprises an extended stem loop region comprising at least 10, at least 100, or at least 500 nucleotides. In some embodiments, the disclosure provides gRNA variants wherein the extended stem loop is modified by inclusion of an RNA stem loop sequence from a heterologous RNA source with proximal 5′ and 3′ ends. In such cases, the heterologous RNA stem loop increases the stability of the gRNA. In some embodiments, the heterologous RNA stem loop is capable of binding a protein, an RNA structure, a DNA sequence, or a small molecule. In some embodiments, an exogenous stem loop region comprises an RNA stem loop or hairpin, for example a thermostable RNA such as MS2 hairpin (SEQ ID NO: 21), Q3 hairpin (SEQ ID NO: 22), U1 hairpin II (SEQ ID NO: 23), Uvsx (SEQ ID NO: 24), PP7 hairpin (SEQ ID NO: 25), Phage replication loop (SEQ ID NO: 26), Kissing loop_a (SEQ ID NO: 27), Kissing loop_b1 (SEQ ID NO: 28), Kissing loop_b2 (SEQ ID NO: 29), G quadriplex M3q (SEQ ID NO: 30), G quadriplex telomere basket (SEQ ID NO: 31), Sarcin-ricin loop (SEQ ID NO: 32), Pseudoknots (SEQ ID NO: 2333), transactivation response element (TAR) (SEQ ID NO: 2333), iron responsive element (IRE) (SEQ ID NO: 2334), phage GA hairpin (SEQ ID NO: 2336), phage AN hairpin (SEQ ID NO: 2337), or sequence variants thereof.

e. Targeting Sequence (a.k.a. Spacer)

[0269] In the gRNAs of the disclosure for use in the SIRV and siAAV, the extended stem loop is followed by a region that forms part of the triplex, and then the targeting sequence linked at the 3′ end of the gRNA scaffold. The targeting sequence targets the CasX ribonucleoprotein holo complex to a specific region of the target nucleic acid sequence or the self-inactivating segment. Thus, for example, gRNA targeting sequences of the disclosure have sequences complementarity to, and therefore can hybridize with, a self-inactivating segment and/or to a portion of the target nucleic acid in a eukaryotic cell, (e.g., a eukaryotic chromosome, chromosomal sequence, a eukaryotic RNA, etc.) that is 3′ adjacent to a sequence complementary to a protospacer adjacent motif (PAM) sequence having a TC motif, such as ATC, CTC, GTC, or TTC, in a 5′ to 3′ orientation. In some embodiments, as described more fully, above, the self-inactivating segment comprises the same sequence as the target nucleic acid that is complementary to the targeting sequence of the first gRNA encoded by the SIRV construct. In other embodiments, a second gRNA is encoded by the SIRV wherein the targeting sequence is different from that of the first gRNA and the targeting sequence is complementary to that of the self-inactivating segment.

[0270] In the case of gRNA for modification of a target nucleic acid of a cell, the targeting sequence of the first gRNA can be specific for or proximal to a portion of a gene in a eukaryotic cell comprising one or more mutations, wherein modification of the gene is sought. In some embodiments, the targeting sequence of a gRNA is specific for an exon. In some embodiments, the targeting sequence of a gRNA is specific for an intron. In some embodiments, the targeting sequence of the gRNA is specific for an intron-exon junction. In some embodiments, the targeting sequence of a gRNA is specific for an accessory element that regulates expression of a target gene. Such accessory elements include, but are not limited to promoter regions, enhancer regions, intergenic regions, 5′ untranslated regions (5′ UTR), 3′ untranslated regions (3′ UTR), intergenic regions, gene enhancer elements, conserved elements, and regions comprising cis-accessory elements. The promoter region is intended to encompass nucleotides within 5 kb of the target gene initiation point or, in the case of gene enhancer elements or conserved elements, can be 1 Mb or more distal to the target gene. In some embodiments, the targeting sequence of the gRNA is specific for the one or more self-inactivating segments. In some embodiments, the SIRV encodes a first gRNA with a targeting sequence specific for the target nucleic acid and encodes a second gRNA with a targeting sequence specific for the self-inactivating segment. In some embodiments, the targeting sequence of the first and the second gRNA are identical and target both the target nucleic acid and the self-inactivating segment, but cleavage of the self-inactivating segment is modulated by one or more mechanisms described herein; e.g., by use of a weaker PAM adjacent to the self-inactivating segment, by use of a weaker gRNA scaffold, or by introducing mis-matches in 1-3, 1-4 or 1-5 nucleotides in the self-inactivating segment. By selection of the targeting sequences of the gRNA and the overall design of the SIRV construct, defined regions of the target nucleic acid sequence can be modified or edited, and the polynucleotide of the SIRV can be cleaved, using the systems described herein.

[0271] In some embodiments, the targeting sequence of the first or the second gRNA has between 14 and 35 consecutive nucleotides. In some embodiments, the targeting sequence has 14, 15, 16, 18, 18, 19, or 20 consecutive nucleotides. In some embodiments, the targeting sequence consists of 21 consecutive nucleotides. In some embodiments, the targeting sequence consists of 20 consecutive nucleotides. In some embodiments, the targeting sequence consists of 19 consecutive nucleotides. In some embodiments, the targeting sequence consists of 18 consecutive nucleotides. In some embodiments, the targeting sequence consists of 17 consecutive nucleotides. In some embodiments, the targeting sequence consists of 16 consecutive nucleotides. In some embodiments, the targeting sequence consists of 15 consecutive nucleotides. In some embodiments, the targeting sequence can comprise 0 to 5, 0 to 4, 0 to 3, or 0 to 2 mismatches relative to the target nucleic acid sequence and retain sufficient binding specificity such that the RNP comprising the gRNA comprising the targeting sequence can form a complementary bond with respect to the target nucleic acid.

f. gRNA Scaffolds

[0272] With the exception of the targeting sequence region, the remaining regions of the gRNA are referred to herein as the scaffold. In some embodiments, the gRNA scaffolds are derived from naturally-occurring sequences, described below as reference gRNA. In other embodiments, the gRNA scaffolds are variants of reference gRNA wherein mutations, insertions, deletions or domain substitutions are introduced to confer desirable properties on the gRNA.

[0273] In some embodiments, a CasX reference gRNA comprises a sequence isolated or derived from Deltaproteobacter (e.g., SEQ ID NOS: 6, 7 and 34). In some embodiments, a CasX reference guide RNA comprises a sequence isolated or derived from Planctomycetes (e.g., SEQ ID NOS: 8, 9 and 35). In still other embodiments, a CasX reference gRNA comprises a sequence isolated or derived from Candidatus Sungbacteria (e.g., SEQ ID NOS: 10-13).

[0274] Table 1 provides the sequences of reference gRNA tracr, cr and scaffold sequences. In some embodiments, the disclosure provides gRNA sequences wherein the gRNA has a scaffold comprising a sequence having at least one nucleotide modification relative to a reference gRNA sequence having a sequence of any one of SEQ ID NOS: 4-16 as set forth in Table 1. It will be understood that in those embodiments wherein a vector comprises a DNA encoding sequence for a gRNA, that thymine (T) bases can be substituted for the uracil (U) bases of any of the gRNA sequence embodiments described herein.

TABLE 1
Reference gRNA tracr and scaffold sequences

| SEQ | |
|---|---|
| ID | |
| NO. | Nucleotide Sequence |
| 4 | ACAUCUGGCGCGUUUAUUCCAUUACUUUGGAGCCAGUCCCAGC |
| | GACUAUGUCGUAUGGACGAAGCGCUUAUUUAUCGGAGAGAAAC |
| | CGAUAAGUAAAACGCAUCAAAG |
| 5 | UACUGGCGCUUUUAUCUCAUUACUUUGAGAGCCAUCACCAGCG |
| | ACUAUGUCGUAUGGGUAAAGCGCUUAUUUAUCGGAGAGAAAUC |
| | CGAUAAAUAAGAAGCAUCAAAG |
| 6 | ACAUCUGGCGCGUUUAUUCCAUUACUUUGGAGCCAGUCCCAGC |
| | GACUAUGUCGUAUGGACGAAGCGCUUAUUUAUCGGAGA |
| 7 | ACAUCUGGCGCGUUUAUUCCAUUACUUUGGAGCCAGUCCCAGC |
| | GACUAUGUCGUAUGGACGAAGCGCUUAUUUAUCGG |
| 8 | UACUGGCGCUUUUAUCUCAUUACUUUGAGAGCCAUCACCAGCG |
| | ACUAUGUCGUAUGGGUAAAGCGCUUAUUUAUCGGAGA |
| 9 | UACUGGCGCUUUUAUCUCAUUACUUUGAGAGCCAUCACCAGCG |
| | ACUAUGUCGUAUGGGUAAAGCGCUUAUUUAUCGG |
| 10 | GUUUACACACUCCCUCUCAUAGGGU |
| 11 | GUUUACACACUCCCUCUCAUGAGGU |
| 12 | UUUUACAUACCCCCUCUCAUGGGAU |
| 13 | GUUUACACACUCCCUCUCAUGGGGG |
| 14 | CCAGCGACUAUGUCGUAUGG |
| 15 | GCGCUUAUUUAUCGGAGAGAAAUCCGAUAAAUAAGAAGC |
| 16 | GGCGCUUUUAUCUCAUUACUUUGAGAGCCAUCACCAGCGACUA |
| | UGUCGUAUGGGUAAAGCGCUUAUUUAUCGGA |

g. gRNA Variants

[0275] In another aspect, the disclosure relates to guide nucleic acid variants (referred to herein as “gRNA variant”) for use in the SIRV and siAAV that comprise one or more modifications relative to a reference gRNA scaffold. As used herein, “scaffold” refers to all parts to the gRNA necessary for gRNA function with the exception of the spacer, or targeting sequence.

[0276] In some embodiments, a reference gRNA of the disclosure may be subjected to one or more mutagenesis methods, such as the mutagenesis methods described herein (as well as in PCT/US20/36506 and WO2020247883A2, incorporated by reference herein), which may include Deep Mutational Evolution (DME), deep mutational scanning (DMS), error prone PCR, cassette mutagenesis, random mutagenesis, staggered extension PCR, gene shuffling, or domain swapping, in order to generate one or more guide nucleic acid variants (referred to herein as “gRNA variant”) with enhanced or varied properties relative to the reference gRNA. gRNA variants also include variants comprising one or more exogenous sequences, for example fused to either the 5′ or 3′ end, or inserted internally. The activity of reference gRNAs may be used as a benchmark against which the activity of gRNA variants are compared, thereby measuring improvements in function or other characteristics of the gRNA variants. In other embodiments, a reference gRNA may be subjected to one or more deliberate, specifically-targeted mutations in order to produce a gRNA variant, for example a rationally designed variant. In some embodiments, a gRNA variant comprises one or more nucleotide substitutions, insertions, deletions, or swapped or replaced regions relative to a reference gRNA sequence of the disclosure. In some embodiments, a mutation can occur in any region of a reference gRNA scaffold to produce a gRNA variant.

[0277] In some embodiments, a gRNA variant comprises one or more nucleotide changes within one or more regions of the reference gRNA scaffold that improve a characteristic of the reference gRNA. A representative example of such a gRNA variant is guide 235 (SEQ ID NO: 2296). Exemplary regions for modification include the RNA triplex, the pseudoknot, the scaffold stem loop, and the extended stem loop. In some cases, the variant scaffold stem further comprises a bubble. In other cases, the variant scaffold further comprises a triplex loop region. In still other cases, the variant scaffold further comprises a 5′ unstructured region. In some embodiments, the gRNA variant scaffold comprises a scaffold stem loop having at least 60% sequence identity, at least 70% sequence identity, at least 80% sequence identity, at least 90% sequence identity, at least 95% sequence identity, or at least 99% sequence identity to SEQ ID NO: 14. In some embodiments, the gRNA variant scaffold comprises a scaffold stem loop having at least 60% sequence identity to SEQ ID NO: 14. In other embodiments, the gRNA variant comprises a scaffold stem loop having the sequence of CCAGCGACUAUGUCGUAGUGG (SEQ ID NO: 36). In other embodiments, the disclosure provides a gRNA scaffold comprising, relative to SEQ ID NO:5, a C18G substitution, a G55 insertion, a U1 deletion, and a modified extended stem loop in which the original 6 nt loop and 13 most-loop-proximal base pairs (32 nucleotides total) are replaced by a Uvsx hairpin (4 nt loop and 5 loop-proximal base pairs; 14 nucleotides total) and the loop-distal base of the extended stem was converted to a fully base-paired stem contiguous with the new Uvsx hairpin by deletion of the A99 and substitution of G65U. In the foregoing embodiment, the gRNA scaffold comprises the sequence

(SEQ ID NO: 2238)
ACUGGCGCUUUUAUCUGAUUACUUUGAGAGCCAUCACCAGCGACUAUGUC
GUAGUGGGUAAAGCUCCCUCUUCGGAGGGAGCAUCAAAG.

[0278] All gRNA variants that have one or more improved characteristics, or add one or more new functions, when the variant gRNA is compared to a reference gRNA described herein, are envisaged as within the scope of the disclosure. Exemplary improved characteristics are described in WO2020247882A1 and PCT/US20/36505, incorporated by reference herein. A representative example of such a gNA variant is guide 174 (SEQ ID NO: 2238), the utility of which is described in the Examples. Another representative example of such a gNA variant is guide 235 (SEQ ID NO: 2296), the utility of which is described in the Examples. In some embodiments, the gRNA variant adds a new function to the RNP comprising the gRNA variant. In some embodiments, the gRNA variant has an improved characteristic selected from: improved stability; improved solubility; improved transcription of the gRNA; improved resistance to nuclease activity; increased folding rate of the gRNA; decreased side product formation during folding; increased productive folding; improved binding affinity to a CasX protein; improved binding affinity to a target DNA when complexed with a CasX protein; improved gene editing or modification when complexed with a CasX protein; improved specificity of editing when complexed with a CasX protein, or any combination thereof. In some cases of the foregoing, the improved characteristic is assessed in an in vitro assay, including the assays of the Examples. In other cases of the foregoing, the improved characteristic is assessed in vivo.

[0279] In some embodiments, the gRNA variants for use in the SIRV and siAAV systems comprises one or more modifications to the gRNA scaffold variant 174 (SEQ ID NO: 2238) selected from the group consisting of the modifications of Table 47, wherein the resulting gRNA variant exhibits an improved functional characteristic compared to the parent 174, when assessed in an in vitro or in vivo assay under comparable conditions. In some embodiments, the gRNA variants comprising one or more modifications to the gRNA scaffold variant 174 are selected from the group consisting of the modifications of Table 47 (with a linked targeting sequence and complexed with a CasX protein) exhibits an improved enrichment score (log 2) of at least about 2.0, at least about 2.5, at least about 3, or at least about 3.5 greater compared to the score of the gRNA scaffold of SEQ ID NO: 2238 in an in vitro assay, including the assays of the Examples described herein (e.g., Example 28). In a particular embodiment, the one or more modifications of gRNA scaffold variant 174 are selected from the group consisting of nucleotide positions U11, U24, A29, U65, C66, C68, A69, U76, G77, A79, and A87. In a particular embodiment, the modifications of gRNA scaffold variant 174 are U11C, U24C, A29C, U65C, C66G, C68U, an insertion of ACGGA at position 69, an insertion of UCCGU at position 76, G77A, an insertion of GA at position 79, and A87G.

[0280] In some embodiments, the gRNA variants for use in the SIRV and siAAV systems comprises one or more modifications to the gRNA scaffold variant 175 (SEQ ID NO: 2239) selected from the group consisting of the modifications of Table 48. In some embodiments, a gRNA variant for use in the SIRV and siAAV systems comprises one or more modifications relative to gRNA scaffold variant 175 (SEQ ID NO: 2239), wherein the resulting gRNA variant exhibits an improved functional characteristic compared to the parent 175, when assessed in an in vitro or in vivo assay under comparable conditions (e.g., the assays of Example 28). For example, variants with modifications to the triplex loop of gRNA variant 175 show high enrichment relative to the 175 scaffold, particularly mutations to C15 or C17. Additionally, changes to either member of the predicted pair in the pseudoknot stem between G7 and A29 are both highly enriched relative to the 175 scaffold, with converting A29 to a C or a T to form a canonical Watson-Crick pairing (G7:C29), and the second of which would form a GU wobble pair (G7:U29), both of which may be expected to increase stability of the helix relative to the G:A pair. In addition, the insertion of a C at position 54 in guide scaffold 175 results in an enriched modification. In some embodiments, the disclosure provides gRNA variants comprising one or more modifications to the gRNA scaffold variant 175 (SEQ ID NO: 2239) are selected from the group consisting of the modifications of Table 48, wherein the resulting gRNA variant exhibits an improved functional characteristic compared to the parent 175, when assessed in an in vitro or in vivo assay under comparable conditions. In some embodiments, the gRNA variants comprising one or more modifications to the gRNA scaffold variant 175 are selected from the group consisting of the modifications of Table 48 (with a linked targeting sequence and complexed with a Class 2, Type V CRISPR protein) exhibits an improved enrichment score (log 2) of at least about 1.2, at least about 1.5, at least about 2.0, at least about 2.5, at least about 3, or at least about 3.5 greater compared to the score of the gRNA scaffold of SEQ ID NO: 2292 in an in vitro assay, including the assays of the Examples described herein. In a particular embodiment, the modifications of gRNA scaffold variant 175 are selected from the group consisting of nucleotide positions C9, U11, C17, U24, A29, G54, C65, A89, and A96. In a particular embodiment, the modifications of gRNA scaffold variant 175 are C9U, U11C, C17G, U24C, A29C, an insertion of G at position 54, an insertion of C at position 65, A89G, and A96G. In one embodiment, the insertion of C at position 64 and the A88G substitution relative to the sequence of SEQ ID NO: 2292 resolves an asymmetrical bulge element of the extended stem, enhancing the stability of the extended stem of the gRNA scaffold. In another embodiment, the substitutions of U11C, U24C, and A95G relative to the sequence of SEQ ID NO: 2292 increases the stability of the triplex region of the gRNA scaffold. In another embodiment, the substitution of A29C relative to the sequence of SEQ ID NO: 2292 increases the stability of the pseudoknot stem. A representative example of such a gRNA variant with improved characteristics relative to gRNA variant from which it was derived is guide 235 (SEQ ID NO: 2296), the utility of which is described in the Examples.

[0281] In exemplary embodiments, a gRNA variant for use in the SIRV and siAAV systems comprises one or more modifications relative to gRNA scaffold variant 215 (SEQ ID NO:2276), wherein the resulting gRNA variant exhibits an improved functional characteristic compared to the parent 215, when assessed in an in vitro or in vivo assay under comparable conditions.

[0282] In exemplary embodiments, a gRNA variant for use in the SIRV and siAAV systems comprises one or more modifications relative to gRNA scaffold variant 221 (SEQ ID NO: 2282), wherein the resulting gRNA variant exhibits an improved functional characteristic compared to the parent 221, when assessed in an in vitro or in vivo assay under comparable conditions.

[0283] In exemplary embodiments, a gRNA variant for use in the SIRV and siAAV systems comprises one or more modifications relative to gRNA scaffold variant 225 (SEQ ID NO: 2286), wherein the resulting gRNA variant exhibits an improved functional characteristic compared to the parent 225, when assessed in an in vitro or in vivo assay under comparable conditions.

[0284] In exemplary embodiments, a gRNA variant for use in the SIRV and siAAV systems comprises one or more modifications relative to gRNA scaffold variant 235 (SEQ ID NO: 2296), including CpG depletion, wherein the resulting gRNA variant exhibits an improved functional characteristic compared to the parent 225, when assessed in an in vitro or in vivo assay under comparable conditions.

[0285] In exemplary embodiments, a gRNA variant for use in the SIRV and siAAV systems comprises one or more modifications relative to gRNA scaffold variant 251 (SEQ ID NO: 2312), wherein the resulting gRNA variant exhibits an improved functional characteristic compared to the parent 251, when assessed in an in vitro or in vivo assay under comparable conditions.

[0286] In exemplary embodiments, a gRNA variant for use in the SIRV and siAAV systems comprises one or more modifications relative to gRNA scaffold variant 316 (SEQ ID NO: 4028), including CpG depletion or chemical modifications, wherein the resulting gRNA variant exhibits an improved functional characteristic compared to the parent 235 and 174, when assessed in an in vitro or in vivo assay under comparable conditions.

[0287] In some embodiments, the gRNA variant for use in the SIRV and siAAV systems comprises an exogenous extended stem loop, with such differences from a reference gRNA described as follows. In some embodiments, an exogenous extended stem loop has little or no identity to the reference stem loop regions disclosed herein (e.g., SEQ ID NO: 15). In some embodiments, an exogenous stem loop is at least 10 bp, at least 20 bp, at least 30 bp, at least 40 bp, at least 50 bp, at least 60 bp, at least 70 bp, at least 80 bp, at least 90 bp, at least 100 bp, at least 200 bp, at least 300 bp, at least 400 bp, or at least 500 bp. In some embodiments, the heterologous stem loop increases the stability of the gRNA. In some embodiments, the heterologous RNA stem loop is capable of binding a protein, an RNA structure, a DNA sequence, or a small molecule. In some embodiments, an exogenous stem loop region replacing the stem loop comprises an RNA stem loop or hairpin in which the resulting gRNA has increased stability and, depending on the choice of loop, can interact with certain cellular proteins. Such exogenous extended stem loops can comprise, for example a thermostable RNA such as MS2 hairpin (ACAUGAGGAUCACCCAUGU; SEQ ID NO: 21), Q3 hairpin (AUGCAUGUCUAAGACAGCAU; SEQ ID NO: 22), U1 hairpin II (GGAAUCCAUUGCACUCCGGAUUUCACUAG; SEQ ID NO: 23), Uvsx (CCUCUUCGGAGG; SEQ ID NO: 24), PP7 hairpin (AAGGAGUUUAUAUGGAAACCCUU; SEQ ID NO: 25), Phage replication loop (AGGUGGGACGACCUCUCGGUCGUCCUAUCU; SEQ ID NO: 26), Kissing loop_a (UGCUCGCUCCGUUCGAGCA; SEQ ID NO: 27), Kissing loop_b1 (UGCUCGACGCGUCCUCGAGCA; SEQ ID NO: 28), Kissing loop_b2 (UGCUCGUUUGCGGCUACGAGCA; SEQ ID NO: 29), G quadriplex M3q (AGGGAGGGAGGGAGAGG; SEQ ID NO: 30), G quadriplex telomere basket (GGUUAGGGUUAGGGUUAGG; SEQ ID NO: 31), Sarcin-ricin loop (CUGCUCAGUACGAGAGGAACCGCAG; SEQ ID NO: 32), Pseudoknots (UACACUGGGAUCGCUGAAUUAGAGAUCGGCGUCCUUUCAUUCUAUAUACUUUGGAG UUUUAAAAUGUCUCUAAGUACA; SEQ ID NO: 33), transactivation response element (TAR) (GGCUCGUGUAGCUCAUUAGCUCCGAGCC (SEQ ID NO: 2333)), iron responsive element (IRE) CCGUGUGCAUCCGCAGUGUCGGAUCCACGG (SEQ ID NO: 2334)), phage GA hairpin (AAAACAUAAGGAAAACCUAUGUU (SEQ ID NO: 2336)), phage AN hairpin (GCCCUGAAGAAGGGC (SEQ ID NO: 2337)), or sequence variants thereof. In some embodiments, one of the foregoing hairpin sequences is incorporated into the stem loop of the gRNA scaffold.

[0288] Table 2 provides exemplary gRNA variant scaffold sequences of the disclosure. In some embodiments, the gRNA variant scaffold comprises any one of the sequences listed in Table 2, or a sequence having at least about 50%, at least about 60%, at least about 70%, at least about 80%, at least about 90%, at least about 95%, at least about 95%, at least about 96%, at least about 97%, at least about 98%, at least about 99% sequence identity thereto. It will be understood that in those embodiments wherein a vector comprises a DNA encoding sequence for a gRNA, that thymine (T) bases can be substituted for the uracil (U) bases of any of the gRNA sequence embodiments described herein.

TABLE 2
Exemplary gRNA Variant Scaffold Sequences

| SEQ | | |
|---|---|---|
| ID | NAME or | |
| NO: | Modification | NUCLEOTIDE SEQUENCE |
| 2238 | 174 | ACUGGCGCUUUUAUCUGAUUACUUUGAGAGCCAUCACCAGCGACUAU |
| | | GUCGUAGUGGGUAAAGCUCCCUCUUCGGAGGGAGCAUCAAAG |
| 2239 | 175 | ACUGGCGCCUUUAUCUCAUUACUUUGAGAGCCAUCACCAGCGACUAUG |
| | | UCGUAUGGGUAAAGCGCUUACGGACUUCGGUCCGUAAGAAGCAUCAA |
| | | AG |
| 2240 | 176 | GCUGGCGCUUUUAUCUGAUUACUUUGAGAGCCAUCACCAGCGACUAU |
| | | GUCGUAGUGGGUAAAGCUCCCUCUUCGGAGGGAGCAUCAAAG |
| 2241 | 177 | ACUGGCGCUUUUAUCUGAUUACUUUGAGAGCCAUCACCAGCGACUAU |
| | | GUCGUAUGGGUAAAGCUCCCUCUUCGGAGGGAGCAUCAAAG |
| 2242 | 179 | ACUGGCGCUUUUAUCUGAUUACUUUGAGAGCCAUCACCAGCGACUAU |
| | | GUCGUAGUGGGUAAAUAGGAGCUGCACUAUGGGCGCAGUGUCAUUGA |
| | | CGCUGACGGUACAGGCCAGACAAUUAUUGUCUGGUAUAGUGCAGCUC |
| | | CUAAUCAAAG |
| 2243 | 181 | ACUGGCGCCUUUAUCUGAUUACUUUGAGAGCCAUCACCAGCGACUAUG |
| | | UCGUAUGGGUAAAGCGCUUACGGACUUCGGUCCGUAAGAAGCAUCAA |
| | | AG |
| 2244 | 182 | ACUGGCGCUUUUAUCUGAUUACUUUGAGAGCCAUCACCAGCGACUAU |
| | | GUCGUAUGGGUAAAGCGCUUACGGACUUCGGUCCGUAAGAAGCAUCA |
| | | AAG |
| 2245 | 183 | ACUGGCGCUUUUAUCUGAUUACUUUGAGAGCCAUCACCAGCGACUAU |
| | | GUCGUAGUGGGUAAAGCGCUUACGGACUUCGGUCCGUAAGAAGCAUC |
| | | AAAG |
| 2246 | 184 | ACUGGCGCUUUUAUCUGAUUACUUUGAGAGCCAUCACCAGCGACUAU |
| | | GUCGUAUUGGGUAAAGCUCCCUCUUCGGAGGGAGCAUCAAAG |
| 2247 | 185 | ACUGGCGCUUUUAUCUGAUUACUUUGAGAGCCAUCACCAGCGACUAU |
| | | GUCGUAUUGGGUAAAGCGCUUACGGACUUCGGUCCGUAAGAAGCAUC |
| | | AAAG |
| 2248 | 186 | ACUGGCGCCUUUAUCAUCAUUACUUUGAGAGCCAUCACCAGCGACUAU |
| | | GUCGUAUGGGUAAAGCGCUUACGGACUUCGGUCCGUAAGAAGCAUCA |
| | | AAG |
| 2249 | 187 | ACUGGCGCUUUUAUCUGAUUACUUUGAGAGCCAUCACCAGCGACUAU |
| | | GUCGUAGUGGGUAAAGCGCCCUCUUCGGAGGGAAGCAUCAAAG |
| 2250 | 188 | ACUGGCGCUUUUAUCUGAUUACUUUGAGAGCCAUCACCAGCGACUAU |
| | | GUCGUAGUGGGUAAAGCUCACAUGAGGAUCACCCAUGUGAGCAUCAA |
| | | AG |
| 2251 | 189 | ACUGGCACUUUUACCUGAUUACUUUGAGAGCCAACACCAGCGACUAUG |
| | | UCGUAGUGGGUAAAGCUCCCUCUUCGGAGGGAGCAUCAAAG |
| 2252 | 190 | ACUGGCACUUUUAUCUGAUUACUUUGAGAGCCAUCACCAGCGACUAU |
| | | GUCGUAGUGGGUAAAGCUCCCUCUUCGGAGGGAGCAUCAAAG |
| 2253 | 191 | ACUGGCCCUUUUAUCUGAUUACUUUGAGAGCCAUCACCAGCGACUAUG |
| | | UCGUAGUGGGUAAAGCUCCCUCUUCGGAGGGAGCAUCAAAG |
| 2254 | 192 | ACUGGCGCUUUUACCUGAUUACUUUGAGAGCCAUCACCAGCGACUAUG |
| | | UCGUAGUGGGUAAAGCUCCCUCUUCGGAGGGAGCAUCAAAG |
| 2255 | 193 | ACUGGCGCUUUUAUCUGAUUACUUUGAGAGCCAACACCAGCGACUAU |
| | | GUCGUAGUGGGUAAAGCUCCCUCUUCGGAGGGAGCAUCAAAG |
| 2256 | 195 | ACUGGCACCUUUACCUGAUUACUUUGAGAGCCAACACCAGCGACUAUG |
| | | UCGUAUGGGUAAAGCGCUUACGGACUUCGGUCCGUAAGAAGCAUCAA |
| | | AG |
| 2257 | 196 | ACUGGCACCUUUAUCUGAUUACUUUGAGAGCCAUCACCAGCGACUAUG |
| | | UCGUAUGGGUAAAGCGCUUACGGACUUCGGUCCGUAAGAAGCAUCAA |
| | | AG |
| 2258 | 197 | ACUGGCCCCUUUAUCUGAUUACUUUGAGAGCCAUCACCAGCGACUAUG |
| | | UCGUAUGGGUAAAGCGCUUACGGACUUCGGUCCGUAAGAAGCAUCAA |
| | | AG |
| 2259 | 198 | ACUGGCGCCUUUAUCUGAUUACUUUGAGAGCCAACACCAGCGACUAUG |
| | | UCGUAUGGGUAAAGCGCUUACGGACUUCGGUCCGUAAGAAGCAUCAA |
| | | AG |
| 2260 | 199 | GCUGGCGCUUUUAUCUGAUUACUUUGAGAGCCAUCACCAGCGACUAU |
| | | GUCGUAGUGGGUAAAGCUCCCUCUUCGGAGGGAGCAUCAAAG |
| 2261 | 200 | GACUGGCGCUUUUAUCUGAUUACUUUGAGAGCCAUCACCAGCGACUA |
| | | UGUCGUAGUGGGUAAAGCUCCCUCUUCGGAGGGAGCAUCAAAG |
| 2262 | 201 | ACUGGCGCCUUUAUCUGAUUACUUUGGAGAGCCAUCACCAGCGACUAU |
| | | GUCGUAGUGGGUAAAGCUCCCUCUUCGGAGGGAGCAUCAAAG |
| 2263 | 202 | ACUGGCGCAUUUAUCUGAUUACUUUGUGAGCCAUCACCAGCGACUAU |
| | | GUCGUAGUGGGUAAAGCUCCCUCUUCGGAGGGAGCAUCAAAG |
| 2264 | 203 | ACUGGCGCCUUUAUCUGAUUACUUUGAGAGCCAUCACCAGCGACUAUG |
| | | UCGUAGUGGGUAAAGCUCCCUCUUCGGAGGGAGCAUCAAAG |
| 2265 | 204 | ACUGGCGCUUUUAUCUGAUUACUUUGGAGAGCCAUCACCAGCGACUA |
| | | UGUCGUAGUGGGUAAAGCUCCCUCUUCGGAGGGAGCAUCAAAG |
| 2266 | 205 | ACUGGCGCAUUUAUCUGAUUACUUUGAGAGCCAUCACCAGCGACUAU |
| | | GUCGUAGUGGGUAAAGCUCCCUCUUCGGAGGGAGCAUCAAAG |
| 2267 | 206 | ACUGGCGCUUUUAUCUGAUUACUUUGUGAGCCAUCACCAGCGACUAU |
| | | GUCGUAGUGGGUAAAGCUCCCUCUUCGGAGGGAGCAUCAAAG |
| 2268 | 207 | ACUGGCGCUUUUAUUCUGAUUACUUUGAGAGCCAUCACCAGCGACUA |
| | | UGUCGUAGUGGGUAAAGCUCCCUCUUCGGAGGGAGCAUCAAAG |
| 2269 | 208 | ACGGCGCUUUUAUCUGAUUACUUUGAGAGCCAUCACCAGCGACUAUG |
| | | UCGUAGUGGGUAAAGCUCCCUCUUCGGAGGGAGCAUCAAAG |
| 2270 | 209 | ACUGGCGCUUUUAUAUGAUUACUUUGAGAGCCAUCACCAGCGACUAU |
| | | GUCGUAGUGGGUAAAGCUCCCUCUUCGGAGGGAGCAUCAAAG |
| 2271 | 210 | ACUGGCGCUUUUAUCUUGAUUACUUUGAGAGCCAUCACCAGCGACUA |
| | | UGUCGUAGUGGGUAAAGCUCCCUCUUCGGAGGGAGCAUCAAAG |
| 2272 | 211 | ACUGGCGCUUUUAUCUGAUUACUUUGAGAGCCAGCACCAGCGACUAU |
| | | GUCGUAGUGGGUAAAGCUCCCUCUUCGGAGGGAGCAUCAAAG |
| 2273 | 212 | ACUGGCGCUGUUAUCUGAUUACUUCGAGAGCCAUCACCAGCGACUAUG |
| | | UCGUAGUGGGUAAAGCUCCCUCUUCGGAGGGAGCAUCGAAG |
| 2274 | 213 | ACUGGCGCUCUUAUCUGAUUACUUCGAGAGCCAUCACCAGCGACUAUG |
| | | UCGUAGUGGGUAAAGCUCCCUCUUCGGAGGGAGCAUCGAAG |
| 2275 | 214 | ACUGGCGCUUGUAUCUGAUUACUCUGAGAGCCAUCACCAGCGACUAUG |
| | | UCGUAGUGGGUAAAGCUCCCUCUUCGGAGGGAGCAUCAGAG |
| 2276 | 215 | ACUGGCGCUUCUAUCUGAUUACUCUGAGAGCCAUCACCAGCGACUAUG |
| | | UCGUAGUGGGUAAAGCUCCCUCUUCGGAGGGAGCAUCAGAG |
| 2277 | 216 | ACUGGCGCUUUGAUCUGAUUACCUUGAGAGCCAUCACCAGCGACUAUG |
| | | UCGUAGUGGGUAAAGCUCCCUCUUCGGAGGGAGCAUCAAGG |
| 2278 | 217 | ACUGGCGCUUUCAUCUGAUUACCUUGAGAGCCAUCACCAGCGACUAUG |
| | | UCGUAGUGGGUAAAGCUCCCUCUUCGGAGGGAGCAUCAAGG |
| 2279 | 218 | ACUGGCGCUGUUAUCUGAUUACUUUGAGAGCCAUCACCAGCGACUAU |
| | | GUCGUAGUGGGUAAAGCUCCCUCUUCGGAGGGAGCAUCAAAG |
| 2280 | 219 | ACUGGCGCUUUUAUCUGAUUACUUUGAGAGCCAUCACCAGCGACUAU |
| | | GUCGUAGUGGGUAAAGCUCCCUCUUCGGAGGGAGCAUCGAAG |
| 2281 | 220 | ACUGGCGCUUUUAUCUGAUUACUUCGAGAGCCAUCACCAGCGACUAUG |
| | | UCGUAGUGGGUAAAGCUCCCUCUUCGGAGGGAGCAUCAAAG |
| 2282 | 221 | ACUGGCACUUCUAUCUGAUUACUCUGAGAGCCAUCACCAGCGACUAUG |
| | | UCGUAUGGGUAAAGCCGCUUACGGACUUCGGUCCGUAAGAGGCAUCA |
| | | GAG |
| 2283 | 222 | ACUGGCACUUCUAUCUGAUUACUCUGAGAGCCAUCACCAGCGACUAUG |
| | | UCGUAGUGGGUAAAGCUCCCUCUUCGGAGGGAGCAUCAGAG |
| 2284 | 223 | ACUGGCACCUUUAUCUGAUUACUUUGAGAGCCAUCACCAGCGACUAUG |
| | | UCGUAUGGGUAAAGCCGCUUACGGACUUCGGUCCGUAAGAGGCAUCA |
| | | AAG |
| 2285 | 224 | ACUGGCACUUGUAUCUGAUUACUCUGAGAGCCAUCACCAGCGACUAUG |
| | | UCGUAUGGGUAAAGCCGCUUACGGACUUCGGUCCGUAAGAGGCAUCA |
| | | GAG |
| 2286 | 225 | ACUGGCACUUGUAUCUGAUUACUCUGAGAGCCAUCACCAGCGACUAUG |
| | | UCGUAGUGGGUAAAGCUCCCUCUUCGGAGGGAGCAUCAGAG |
| 2287 | 226 | ACUGGCGCUUUUAUCUGAUUACUUUGAGAGCCAUCACCAGCGACUAU |
| | | GUCGUAGUGGGUAAAGCUGCACUAUGGGCGCAGCGUCAAUGACGCUG |
| | | ACGGUACAGGCCAGACAAUUAUUGUCUGGUAUAGUGCAGCAUCAAAG |
| 2288 | 227 | ACUGGCGCUUUUAUCUGAUUACUUUGAGAGCCAUCACCAGCGACUAU |
| | | GUCGUAGUGGGUAAAGCUAGGAGCUUUGUUCCUUGGGUUCUUGGGAG |
| | | CAGCAGGAAGCACUAUGGGCGCAGCGUCAAUGACGCUGACGGUACAG |
| | | GCCAGACAAUUAUUGUCUGGUAUAGUGCAGCAGCAGAACAAUUUGCU |
| | | GAGGGCUAUUGAGGCGCAACAGCAUCUGUUGCAACUCACAGUCUGGG |
| | | GCAUCAAGCAGCUCCAGGCAAGAAUCCUGGCUGUGGAAAGAUACCUA |
| | | AAGGAUCAACAGCUCCUAGCAUCAAAG |
| 2289 | 228 | ACUGGCGCUUUUAUCUGAUUACUUUGAGAGCCAUCACCAGCGACUAU |
| | | GUCGUAGUGGGUAAAGCUCCCCGUACACCAUCAGGGUACGGGGAGCA |
| | | UCAAAG |
| 2290 | 229 | ACUGGCACUUUUAUCUGAUUACUUUGAGAGCCAUCACCAGCGACUAU |
| | | GUCGUAUGGGUAAAGCGCUUACGGACUUCGGUCCGUAAGAAGCAUCA |
| | | AAG |
| 2291 | 230 | ACUGGCACUUCUAUCUGAUUACUCUGAGAGCCAUCACCAGCGACUAUG |
| | | UCGUAUGGGUAAAGCGCUUACGGACUUCGGUCCGUAAGAAGCAUCAG |
| | | AG |
| 2292 | 231 | ACUGGCGCUUCUAUCUGAUUACUCUGAGAGCCAUCACCAGCGACUAUG |
| | | UCGUAUGGGUAAAGCCGCUUACGGACUUCGGUCCGUAAGAGGCAUCA |
| | | GAG |
| 2293 | 232 | ACUGGCACUUCUAUCUGAUUACUCUGAGCGCCAUCACCAGCGACUAUG |
| | | UCGUAUGGGUAAAGCCGCUUACGGACUUCGGUCCGUAAGAGGCAUCA |
| | | GAG |
| 2294 | 233 | ACUGGCGCUUCUAUCUGAUUACUCUGAGCGCCAUCACCAGCGACUAUG |
| | | UCGUAUGGGUAAAGCCGCUUACGGACUUCGGUCCGUAAGAGGCAUCA |
| | | GAG |
| 2295 | 234 | ACUGGCGCUUCUAUCUGAUUACUCUGAGCGCCAUCACCAGCGACUAUG |
| | | UCGUAUGGGUAAAGCGCCUUACGGACUUCGGUCCGUAAGGAGCAUCA |
| | | GAG |
| 2296 | 235 | ACUGGCGCUUCUAUCUGAUUACUCUGAGCGCCAUCACCAGCGACUAUG |
| | | UCGUAGUGGGUAAAGCCGCUUACGGACUUCGGUCCGUAAGAGGCAUC |
| | | AGAG |
| 2297 | 236 | ACGGGACUUUCUAUCUGAUUACUCUGAAGUCCCUCACCAGCGACUAUG |
| | | UCGUAUGGGUAAAGCCGCUUACGGACUUCGGUCCGUAAGAGGCAUCA |
| | | GAG |
| 2298 | 237 | ACCUGUAGUUCUAUCUGAUUACUCUGACUACAGUCACCAGCGACUAUG |
| | | UCGUAUGGGUAAAGCCGCUUACGGACUUCGGUCCGUAAGAGGCAUCA |
| | | GAG |
| 2299 | 238 | ACUGGCGCUUUUAUCUGAUUACUUUGAGAGCCAUCACCAGCGACUAU |
| | | GUCGUAGUGGGUAAAGCUGCACGGUGGGCGCAGCUUCGGCUGACGGU |
| | | ACACCGUGCAGCAUCAAAG |
| 2300 | 239 | ACUGGCGCUUUUAUCUGAUUACUUUGAGAGCCAUCACCAGCGACUAU |
| | | GUCGUAGUGGGUAAAGCUGCACGGUGGGCGCAGCUUCGGCUGACGGU |
| | | ACACCGGUGGGCGCAGCUUCGGCUGACGGUACACCGUGCAGCAUCAAA |
| | | G |
| 2301 | 240 | ACUGGCGCUUUUAUCUGAUUACUUUGAGAGCCAUCACCAGCGACUAU |
| | | GUCGUAGUGGGUAAAGCUGCACGGUGGGCGCAGCUUCGGCUGACGGU |
| | | ACACCGGUGGGCGCAGCUUCGGCUGACGGUACACCGGUGGGCGCAGCU |
| | | UCGGCUGACGGUACACCGUGCAGCAUCAAAG |
| 2302 | 241 | ACUGGCGCUUUUAUCUGAUUACUUUGAGAGCCAUCACCAGCGACUAU |
| | | GUCGUAGUGGGUAAAGCUGCACGGUGGGCGCAGCUUCGGCUGACGGU |
| | | ACACCGGUGGGCGCAGCUUCGGCUGACGGUACACCGGUGGGCGCAGCU |
| | | UCGGCUGACGGUACACCGGUGGGCGCAGCUUCGGCUGACGGUACACCG |
| | | UGCAGCAUCAAAG |
| 2303 | 242 | ACUGGCGCUUUUAUCUGAUUACUUUGAGAGCCAUCACCAGCGACUAU |
| | | GUCGUAGUGGGUAAAGCUGCACGGUGGGCGCAGCUUCGGCUGACGGU |
| | | ACACCGGUGGGCGCAGCUUCGGCUGACGGUACACCGGUGGGCGCAGCU |
| | | UCGGCUGACGGUACACCGGUGGGCGCAGCUUCGGCUGACGGUACACCG |
| | | GUGGGCGCAGCUUCGGCUGACGGUACACCGUGCAGCAUCAAAG |
| 2304 | 243 | ACUGGCGCUUUUAUCUGAUUACUUUGAGAGCCAUCACCAGCGACUAU |
| | | GUCGUAGUGGGUAAAGCUGCACCUAGCGGAGGCUAGGUGCAGCAUCA |
| | | AAG |
| 2305 | 244 | ACUGGCGCUUUUAUCUGAUUACUUUGAGAGCCAUCACCAGCGACUAU |
| | | GUCGUAGUGGGUAAAGCUGCACCUCGGCUUGCUGAAGCGCGCACGGCA |
| | | AGAGGCGAGGUGCAGCAUCAAAG |
| 2306 | 245 | ACUGGCGCUUUUAUCUGAUUACUUUGAGAGCCAUCACCAGCGACUAU |
| | | GUCGUAGUGGGUAAAGCUGCACCUCUCUCGACGCAGGACUCGGCUUGC |
| | | UGAAGCGCGCACGGCAAGAGGCGAGGGGCGGCGACUGGUGAGUACGC |
| | | CAAAAAUUUUGACUAGCGGAGGCUAGAAGGAGAGAGGUGCAGCAUCA |
| | | AAG |
| 2307 | 246 | ACUGGCGCUUUUAUCUGAUUACUUUGAGAGCCAUCACCAGCGACUAU |
| | | GUCGUAGUGGGUAAAGCUGCACGGUGCCCGUCUGUUGUGUCGAGAGA |
| | | CGCCAAAAAUUUUGACUAGCGGAGGCUAGAAGGAGAGAGAUGGGUGC |
| | | CGUGCAGCAUCAAAG |
| 2308 | 247 | ACUGGCGCUUUUAUCUGAUUACUUUGAGAGCCAUCACCAGCGACUAU |
| | | GUCGUAGUGGGUAAAGCUGCACAUGGAGAGGAGAUGUGCAGCAUCAA |
| | | AG |
| 2309 | 248 | ACUGGCGCUUUUAUCUGAUUACUUUGAGAGCCAUCACCAGCGACUAU |
| | | GUCGUAGUGGGUAAAGCUGCACAUGGAGAUGUGCAGCAUCAAAG |
| 2310 | 249 | ACUGGCGCUUUUAUCUGAUUACUUUGAGAGCCAUCACCAGCGACUAU |
| | | GUCGUAGUGGGUAAAGCUUGGGCGCAGCGUCAAUGACGCUGACGGUA |
| | | CAAGCAUCAAAG |
| 2311 | 250 | ACUGGCGCUUUUAUCUGAUUACUUUGAGAGCCAUCACCAGCGACUAU |
| | | GUCGUAGUGGGUAAAGCUGCACUAUGGGCGCAGCGUCAAUGACGCUG |
| | | ACGGUACAGGCCACAUGAGGAUCACCCAUGUGGUAUAGUGCAGCAUC |
| | | AAAG |
| 2312 | 251 | ACUGGCGCUUUUAUCUGAUUACUUUGAGAGCCAUCACCAGCGACUAU |
| | | GUCGUAGUGGGUAAAGCUGCACUAUGGGCGCAGCUCAUGAGGAUCAC |
| | | CCAUGAGCUGACGGUACAGGCCACAUGAGGAUCACCCAUGUGGUAUA |
| | | GUGCAGCAUCAAAG |
| 2313 | 252 | ACUGGCGCUUUUAUCUGAUUACUUUGAGAGCCAUCACCAGCGACUAU |
| | | GUCGUAGUGGGUAAAGCUGCACUAUGGGCGCAGCGUCAAUGACGCUG |
| | | ACGGUACAGGCCACAUGGCAGUCGUAACGACGCGGGUGGUAUAGUGC |
| | | AGCAUCAAAG |
| 2314 | 253 | ACUGGCGCUUUUAUCUGAUUACUUUGAGAGCCAUCACCAGCGACUAU |
| | | GUCGUAGUGGGUAAAGCUGCACUAUGGGCGCAGCAAACAUGGCAGUC |
| | | CUAAGGACGCGGGUUUUGCUGACGGUACAGGCCACAUGGCAGUCGUA |
| | | ACGACGCGGGUGGUAUAGUGCAGCAUCAAAG |
| 2315 | 254 | ACUGGCGCUUUUAUCUGAUUACUUUGAGAGCCAUCACCAGCGACUAU |
| | | GUCGUAGUGGGUAAAGCUGCACUAUGGGCGCAGACAUGGCAGUCGUA |
| | | ACGACGCGGGUCUGACGGUACAGGCCACAUGAGGAUCACCCAUGUGGU |
| | | AUAGUGCAGCAUCAAAG |
| 2316 | 255 | ACUGGCGCUUUUAUCUGAUUACUUUGAGAGCCAUCACCAGCGACUAU |
| | | GUCGUAGUGGGUAAAGCUGCACUAAGGAGUUUAUAUGGAAACCCUUA |
| | | GUGCAGCAUCAAAG |
| 2317 | 256 | ACUGGCGCUUUUAUCUGAUUACUUUGAGAGCCAUCACCAGCGACUAU |
| | | GUCGUAGUGGGUAAAGCUCAGGAAGCACUAUGGGCGCAGCGUCAAUG |
| | | ACGCUGACGGUACAGGCCAGACAAUUAUUGUCUGGUAUAGUGCAGCA |
| | | GCAGAACAAUUUGCUGAGGGCUAUUGAGGCGCAACAGCAUCUGUUGC |
| | | AACUCACAGUCUGGGGCAUCAAGCAGCUCCAGGCAAGAAUCCUGAGCA |
| | | UCAAAG |
| 2318 | 257 | ACUGGCGCUUUUAUCUGAUUACUUUGAGAGCCAUCACCAGCGACUAU |
| | | GUCGUAGUGGGUAAAGCUGCACGCCCUGAAGAAGGGCGUGCAGCAUC |
| | | AAAG |
| 2319 | 258 | ACUGGCGCUUUUAUCUGAUUACUUUGAGAGCCAUCACCAGCGACUAU |
| | | GUCGUAGUGGGUAAAGCUGCACGGCUCGUGUAGCUCAUUAGCUCCGA |
| | | GCCGUGCAGCAUCAAAG |
| 2320 | 259 | ACUGGCGCUUUUAUCUGAUUACUUUGAGAGCCAUCACCAGCGACUAU |
| | | GUCGUAGUGGGUAAAGCUGCACCCGUGUGCAUCCGCAGUGUCGGAUCC |
| | | ACGGGUGCAGCAUCAAAG |
| 2321 | 260 | ACUGGCGCUUUUAUCUGAUUACUUUGAGAGCCAUCACCAGCGACUAU |
| | | GUCGUAGUGGGUAAAGCUGCACGGAAUCCAUUGCACUCCGGAUUUCA |
| | | CUAGGUGCAGCAUCAAAG |
| 2322 | 261 | ACUGGCGCUUUUAUCUGAUUACUUUGAGAGCCAUCACCAGCGACUAU |
| | | GUCGUAGUGGGUAAAGCUGCACAUGCAUGUCUAAGACAGCAUGUGCA |
| | | GCAUCAAAG |
| 2323 | 262 | ACUGGCGCUUUUAUCUGAUUACUUUGAGAGCCAUCACCAGCGACUAU |
| | | GUCGUAGUGGGUAAAGCUGCACAAAACAUAAGGAAAACCUAUGUUGU |
| | | GCAGCAUCAAAG |
| 2324 | 263 | ACUGGCGCUUCUAUCUGAUUACUCUGAGCGCCAUCACCAGCGACUAUG |
| | | UCGUAGUGGGUAAAGCCGCUUACGGACUAUGGGCGCAGCGUCAAUGA |
| | | CGCUGACGGUACAGGCCAGACAAUUAUUGUCUGGUAUAGUCCGUAAG |
| | | AGGCAUCAGAG |
| 2325 | 264 | ACUGGCGCUUCUAUCUGAUUACUCUGAGCGCCAUCACCAGCGACUAUG |
| | | UCGUAGUGGGUAAAGCCGCUUACGGGUGGGCGCAGCGUCAAUGACGC |
| | | UGACGGUACAGGCCAGACAAUUAUUGUCUGGUACCCGUAAGAGGCAU |
| | | CAGAG |
| 2326 | 265 | ACUGGCGCUUCUAUCUGAUUACUCUGAGCGCCAUCACCAGCGACUAUG |
| | | UCGUAGUGGGUAAAGCCGCUUACGGACUAUGGGCGCAGCGUCAAUGA |
| | | CGCUGACGGUACAGGCCACAUGAGGAUCACCCAUGUGGUAUAGUCCGU |
| | | AAGAGGCAUCAGAG |
| 2327 | 266 | ACUGGCGCUUUUAUCUGAUUACUUUGAGAGCCAUCACCAGCGACUAU |
| | | GUCGUAGUGGGUAAAGCUCCCUAUGGGCGCAGCGUCAAUGACGCUGA |
| | | CGGUACAGGCCACAUGAGGAUCACCCAUGUGGUAUAGGGAGCAUCAA |
| | | AG |
| 2328 | 267 | ACUGGCGCUUCUAUCUGAUUACUCUGAGCGCCAUCACCAGCGACUAUG |
| | | UCGUAGUGGGUAAAGCCGCUUACGGACUAUGGGCGCAGCUCAUGAGG |
| | | AUCACCCAUGAGCUGACGGUACAGGCCACAUGAGGAUCACCCAUGUGG |
| | | UAUAGUCCGUAAGAGGCAUCAGAG |
| 2329 | 268 | ACUGGCGCUUUUAUCUGAUUACUUUGAGAGCCAUCACCAGCGACUAU |
| | | GUCGUAGUGGGUAAAGCUCCCUAUGGGCGCAGCUCAUGAGGAUCACCC |
| | | AUGAGCUGACGGUACAGGCCACAUGAGGAUCACCCAUGUGGUAUAGG |
| | | GAGCAUCAAAG |
| 2330 | 269 | ACUGGCGCUUCUAUCUGAUUACUCUGAGCGCCAUCACCAGCGACUAUG |
| | | UCGUAGUGGGUAAAGCCGCUUACGGACUAUGGGCGCAGCGUCAAUGA |
| | | CGCUGACGGUACAGGCCACAUGGCAGUCGUAACGACGCGGGUGGUAU |
| | | AGUCCGUAAGAGGCAUCAGAG |
| 2331 | 270 | ACUGGCGCUUUUAUCUGAUUACUUUGAGAGCCAUCACCAGCGACUAU |
| | | GUCGUAGUGGGUAAAGCUCCCUAUGGGCGCAGCGUCAAUGACGCUGA |
| | | CGGUACAGGCCACAUGGCAGUCGUAACGACGCGGGUGGUAUAGGGAG |
| | | CAUCAAAG |
| 3992 | 271 | ACUGGCGCUUCUAUCUGAUUACUCUGAGCGCCAUCACCAGCGACUAUG |
| | | UCGUAGUGGGUAAAGCCGCUUACGGACUAUGGGCGCAGCAAACAUGG |
| | | CAGUCCUAAGGACGCGGGUUUUGCUGACGGUACAGGCCACAUGGCAG |
| | | UCGUAACGACGCGGGUGGUAUAGUCCGUAAGAGGCAUCAGAG |
| 3993 | 272 | ACUGGCGCUUUUAUCUGAUUACUUUGAGAGCCAUCACCAGCGACUAU |
| | | GUCGUAGUGGGUAAAGCUCCCUAUGGGCGCAGCAAACAUGGCAGUCC |
| | | UAAGGACGCGGGUUUUGCUGACGGUACAGGCCACAUGGCAGUCGUAA |
| | | CGACGCGGGUGGUAUAGGGAGCAUCAAAG |
| 3994 | 273 | ACUGGCGCUUCUAUCUGAUUACUCUGAGCGCCAUCACCAGCGACUAUG |
| | | UCGUAGUGGGUAAAGCCGCUUACGGACUAUGGGCGCAGACAUGGCAG |
| | | UCGUAACGACGCGGGUCUGACGGUACAGGCCACAUGAGGAUCACCCAU |
| | | GUGGUAUAGUCCGUAAGAGGCAUCAGAG |
| 3995 | 274 | ACUGGCGCUUUUAUCUGAUUACUUUGAGAGCCAUCACCAGCGACUAU |
| | | GUCGUAGUGGGUAAAGCUCCCUAUGGGCGCAGACAUGGCAGUCGUAA |
| | | CGACGCGGGUCUGACGGUACAGGCCACAUGAGGAUCACCCAUGUGGUA |
| | | UAGGGAGCAUCAAAG |
| 4028 | 316 | ACTGGCGCTTCTATCTGATTACTCTGAGCGCCATCACCAGCGACTATGTC |
| | | GTAGTGGGTAAAGCTCCCTCTTCGGAGGGAGCATCAGAG |

[0289] In some embodiments, the scaffold of the gRNA for use in the siAAV comprises SEQ ID NOS: 2101-2237.

[0290] In some embodiments, the scaffold of the gRNA variant(s) encoded by the polynucleotide of the SIRV comprises an exogenous extended stem loop, with such differences from a reference gRNA described as follows. In some embodiments, an exogenous extended stem loop has little or no identity to the reference stem loop regions disclosed herein (e.g., SEQ ID NO: 15). In some embodiments, an exogenous stem loop is at least 10 bp, at least 20 bp, at least 30 bp, at least 40 bp, at least 50 bp, at least 60 bp, at least 70 bp, at least 80 bp, at least 90 bp, at least 100 bp, at least 200 bp, at least 300 bp, at least 400 bp, or at least 500 bp. In some embodiments, the 5′ and 3′ ends of the exogenous stem loop are base paired; i.e., interact to form a region of duplex RNA. In some embodiments, the 5′ and 3′ ends of the exogenous stem loop are base paired, and one or more regions between the 5′ and 3′ ends of the exogenous stem loop are not base paired. In some embodiments, the at least one nucleotide modification comprises: (a) substitution of 1 to 15 consecutive or non-consecutive nucleotides in the gRNA variant in one or more regions; (b) a deletion of 1 to 10 consecutive or non-consecutive nucleotides in the gRNA variant in one or more regions; (c) an insertion of 1 to 10 consecutive or non-consecutive nucleotides in the gRNA variant in one or more regions; (d) a substitution of the scaffold stem loop or the extended stem loop with an RNA stem loop sequence from a heterologous RNA source with proximal 5′ and 3′ ends; or any combination of (a)-(d).

[0291] In some embodiments, the scaffold of the gRNA variant(s) encoded by the polynucleotide of the SIRV comprises a sequence or subsequence of any one of SEQ ID NOS: 2238, 2239, 2240, 2242, 2246, 2250, 2251, 2261-2287, 2291, 2296, or 4028 and a sequence of an exogenous stem loop.

[0292] In some embodiments, the scaffold of the gRNA variant(s) encoded by the polynucleotide of the SIRV comprises a scaffold stem loop having at least 60% identity to SEQ ID NO: 14. In some embodiments, the gRNA variant comprises a scaffold stem loop having at least 60% identity, at least 70% identity, at least 80% identity, at least 90% identity, at least 95% identity, at least 98% identity or at least 99% identity to SEQ ID NO: 14. In some embodiments, the gRNA variant comprises a scaffold stem loop comprising SEQ ID NO: 14.

[0293] In some embodiments, the scaffold of the gRNA variant(s) encoded by the polynucleotide of the SIRV comprises a scaffold stem loop sequence of CCAGCGACUAUGUCGUAGUGG (SEQ ID NO: 36). In some embodiments, the gRNA variant comprises a scaffold stem loop sequence of CCAGCGACUAUGUCGUAGUGG (SEQ ID NO: 36) with at least 1, 2, 3, 4, or 5 mismatches thereto.

[0294] In some embodiments, the scaffold of the gRNA variant(s) encoded by the polynucleotide of the SIRV comprises one or more modifications relative to the sequence of another gRNA variant.

[0295] In some embodiments, the scaffold of the gRNA variant(s) encoded by the polynucleotide of the SIRV comprises a sequence of SEQ ID NO:2104, SEQ ID NO:2106, SEQ ID NO:2163, SEQ ID NO:2107, SEQ ID NO:2164, SEQ ID NO:2165, SEQ ID NO:2166, SEQ ID NO:2103, SEQ ID NO:2167, SEQ ID NO:2105, SEQ ID NO:2108, SEQ ID NO:2112, SEQ ID NO:2160, SEQ ID NO:2170, SEQ ID NO:2114, SEQ ID NO:2171, SEQ ID NO:2112, SEQ ID NO:2173, SEQ ID NO:2102, SEQ ID NO:2174, SEQ ID NO:2175, SEQ ID NO:2109, SEQ ID NO:2176, SEQ ID NO:2238, SEQ ID NO:2239, SEQ ID NO:2240, SEQ ID NO:2241, SEQ ID NO:2274, SEQ ID NO:2276, SEQ ID NO: 2279, SEQ ID NO: 2286, SEQ ID NO: 2289, SEQ ID NO: 2296, or SEQ ID NO: 4028.

[0296] In some embodiments, the scaffold of the gRNA variant(s) encoded by the polynucleotide of the SIRV comprises one or more modifications relative to the sequence of another gRNA variant. In some embodiments, the gRNA variant comprises one or more additional changes to a sequence of any one of SEQ ID NOs: 2201-2286. In some embodiments, the gRNA variant comprises a sequence of any one of SEQ ID NOS: 2238, 2239, 2240, 2243, 2246, 2250, 2251, 2261-2286, 2289, 2296, or 4028, or a sequence having at least about 70%, at least about 80%, at least about 90%, at least about 95%, at least about 96%, at least about 97%, at least about 98%, at least about 99% identity thereto.

[0297] In some embodiments, the scaffold of the gRNA variant(s) encoded by the polynucleotide of the SIRV comprises the sequence of any one of SEQ ID NOS: 2201-2286, 2289, 2296, or 4028 of Table 2. In some embodiments, the scaffold of the gRNA consists or consists essentially of the sequence of any one of SEQ ID NOS: 2201-2286, 2289 2296, or 4028. In some embodiments, the scaffold of the gRNA variant sequence is at least about 60% identical, at least about 65% identical, at least about 70% identical, at least about 75% identical, at least about 80% identical, at least about 85% identical, at least about 90% identical, at least about 91% identical, at least about 92% identical, at least about 93% identical, at least about 94% identical, at least about 95% identical, at least about 96% identical, at least about 97% identical, at least about 98% identical or at least about 99% identical to any one of SEQ ID NOS: 2201-2286, 2289, 2296, or 4028. In exemplary embodiments the gRNA variant retains the ability to bind a CasX. In a particular embodiment, the gRNA variant comprises a sequence of any one of SEQ ID NOS: 2238, 2239, or 2296.

[0298] In some embodiments, the encoded gRNA variant of the SIRV further comprises a spacer (or targeting sequence) region located at the 3′ end of the gRNA, described more fully, supra, which comprises at least 14 to about 20 nucleotides wherein the spacer is designed with a sequence that is complementary to a target DNA. In some embodiments, the targeting sequence has 14, 15, 16, 17, 18, 19, or 20 nucleotides. In some embodiments, the encoded gRNA variant comprises a targeting sequence having 20 nucleotides. In some embodiments, the targeting sequence has 19 nucleotides. In some embodiments, the targeting sequence has 18 nucleotides. In some embodiments, the targeting sequence has 17 nucleotides. In some embodiments, the targeting sequence has 16 nucleotides. In some embodiments, the targeting sequence has 15 nucleotides. In some embodiments, the targeting sequence has 14 nucleotides.

V. CRISPR Proteins of the SIRV and siAAV Systems

[0299] The present disclosure provides SIRV and siAAV systems encoding a CRISPR nuclease that have utility in genome editing or modification of eukaryotic cells, as well as being an integral component of the self-inactivating feature of the construct. In some embodiments, the CRISPR nuclease employed in the genome-editing systems is a Class 2, Type V nuclease. Although members of Class 2, Type V CRISPR-Cas systems have differences, they share some common characteristics that distinguish them from the Cas9 systems. Firstly, the Class 2, Type V nucleases possess a single RNA-guided RuvC domain-containing effector but no HNH domain, and they recognize T-rich PAM 5′ upstream to the target region on the non-targeted strand, which is different from Cas9 systems which rely on G-rich PAM at 3′ side of target sequences. Type V nucleases generate staggered double-stranded breaks distal to the PAM sequence, unlike Cas9, which generates a blunt end in the proximal site close to the PAM. In addition, Type V nucleases degrade ssDNA in trans when activated by target dsDNA or ssDNA binding in cis. In some embodiments, the expressed Type V nucleases of the SIRV and siAAV embodiments recognize a 5′-TC PAM motif and produce staggered ends cleaved solely by the RuvC domain. In some embodiments, the Type V nuclease is selected from the group consisting of Cas12a (Cpf1), Cas12b (C2c1), Cas12c (C2c3), Cas12d (CasY), Cas12e (CasX), Cas12f, Cas12g, Cas12h, Cas12i, Cas12j, Cas12k, Cas14, and Cas(D. In some embodiments, the Type V nuclease for incorporation in the SIRV and siAAV of the disclosure has an encoding DNA sequence of less than about 2950 nucleotides, less than about 2940 nucleotides, less than about 2900 nucleotides, less than about 2850 nucleotides, less than about 2800 nucleotides, less than about 2750 nucleotides, less than about 2700 nucleotides, less than about 2650 nucleotides, less than about 2600 nucleotides, less than about 2550 nucleotides, less than about 2450 nucleotides, or less than about 2450 nucleotides.

[0300] In some embodiments, the present disclosure provides SIRV and siAAV systems encoding a Class 2 Type V protein, e.g., a CasX protein and one or more gRNA acids that upon expression in a cell are able to form an RNP complex and are specifically designed to modify a target nucleic acid sequence in eukaryotic cells, as well as cleave the self-inactivating segments utilized in the polynucleotide comprising the transgene of the SIRV construct.

[0301] The term “CasX protein”, as used herein, refers to a family of proteins, and encompasses all naturally occurring CasX proteins, proteins that share at least 50% identity to naturally occurring CasX proteins, as well as CasX variants possessing one or more improved characteristics relative to a naturally-occurring CasX protein, described more fully, below. CasX proteins of the disclosure comprise at least the following domains: a non-target strand binding (NTSB) domain, a target strand loading (TSL) domain, a helical I domain, a helical II domain, an oligonucleotide binding domain (OBD), and a RuvC DNA cleavage domain, or a subdomain thereof, as listed in Tables 3 and 4.

[0302] A CasX protein functions as an endonuclease that catalyzes a double strand break at a specific sequence in a targeted double-stranded DNA (dsDNA). In some embodiments, the encoded CasX of the system is a reference CasX. In other embodiments, the CasX protein is not a naturally-occurring protein (e.g., the CasX protein is a CasX variant protein, a chimeric protein, and the like).

[0303] The editing specificity of the CasX:gRNA RNP is provided by the targeting sequence of the associated gRNA, which hybridizes to a sequence within the target nucleic acid sequence or the self-inactivating segment, as described supra.

[0304] In some embodiments, a CasX protein can bind and/or modify (e.g., cleave, nick, methylate, demethylate, etc.) a target nucleic acid sequence and/or a polypeptide associated with the target nucleic acid sequence (e.g., methylation or acetylation of a histone tail).

a. Reference CasX Proteins

[0305] The disclosure provides wild-type reference CasX proteins and the polynucleotides that encode them for use in the SIRV and siAAV systems. In some embodiments, the reference CasX proteins are modified to create CasX variants for use in the SIRV and siAAV systems. In some embodiments, a reference CasX protein is derived from a naturally-occurring protein. For example, reference CasX proteins can be isolated or cloned from naturally occurring prokaryotes, such as Deltaproteobacter, Planctomycetes, or Candidatus Sungbacteria species. A reference CasX protein (interchangeably referred to herein as a reference CasX polypeptide) is a type II CRISPR/Cas endonuclease belonging to the CasX (interchangeably referred to as Cas12e) family of proteins that interacts with a guide RNA to form a ribonucleoprotein (RNP) complex.

[0306] In some cases, a reference CasX protein is isolated or derived from Deltaproteobacter having a sequence of:

| (SEQ ID NO: 1) | |
|---|---|
| 1 | MEKRINKIRK KLSADNATKP VSRSGPMKTL LVRVMTDDLK KRLEKRRKKP EVMPQVISNN |
| 61 | AANNLRMLLD DYTKMKEAIL QVYWQEFKDD HVGLMCKFAQ PASKKIDQNK LKPEMDEKGN |
| 121 | LTTAGFACSQ CGQPLFVYKL EQVSEKGKAY TNYFGRCNVA EHEKLILLAQ LKPEKDSDEA |
| 181 | VTYSLGKFGQ RALDFYSIHV TKESTHPVKP LAQIAGNRYA SGPVGKALSD ACMGTIASFL |
| 241 | SKYQDIIIEH QKVVKGNQKR LESLRELAGK ENLEYPSVTL PPQPHTKEGV DAYNEVIARV |
| 301 | RMWVNLNLWQ KLKLSRDDAK PLLRLKGFPS FPVVERRENE VDWWNTINEV KKLIDAKRDM |
| 361 | GRVFWSGVTA EKRNTILEGY NYLPNENDHK KREGSLENPK KPAKRQFGDL LLYLEKKYAG |
| 421 | DWGKVFDEAW ERIDKKIAGL TSHIEREEAR NAEDAQSKAV LTDWLRAKAS FVLERLKEMD |
| 481 | EKEFYACEIQ LQKWYGDLRG NPFAVEAENR VVDISGFSIG SDGHSIQYRN LLAWKYLENG |
| 541 | KREFYLLMNY GKKGRIRFTD GTDIKKSGKW QGLLYGGGKA KVIDLTFDPD DEQLIILPLA |
| 601 | FGTRQGREFI WNDLLSLETG LIKLANGRVI EKTIYNKKIG RDEPALFVAL TFERREVVDP |
| 661 | SNIKPVNLIG VDRGENIPAV IALTDPEGCP LPEFKDSSGG PTDILRIGEG YKEKQRAIQA |
| 721 | AKEVEQRRAG GYSRKFASKS RNLADDMVRN SARDLFYHAV THDAVLVFEN LSRGFGRQGK |
| 781 | RTFMTERQYT KMEDWLTAKL AYEGLTSKTY LSKTLAQYTS KTCSNCGFTI TTADYDGMLV |
| 841 | RLKKTSDGWA TTLNNKELKA EGQITYYNRY KRQTVEKELS AELDRLSEES GNNDISKWTK |
| 901 | GRRDEALFLL KKRFSHRPVQ EQFVCLDCGH EVHADEQAAL NIARSWLFLN SNSTEFKSYK |
| 961 | SGKQPFVGAW QAFYKRRLKE VWKPNA. |

[0307] In some cases, a reference CasX protein is isolated or derived from Planctomycetes having a sequence of:

| (SEQ ID NO: 2) | |
|---|---|
| 1 | MQEIKRINKI RRRLVKDSNT KKAGKTGPMK TLLVRVMTPD LRERLENLRK KPENIPQPIS |
| 61 | NTSRANLNKL LTDYTEMKKA ILHVYWEEFQ KDPVGLMSRV AQPAPKNIDQ RKLIPVKDGN |
| 121 | ERLTSSGFAC SQCCQPLYVY KLEQVNDKGK PHTNYFGRCN VSEHERLILL SPHKPEANDE |
| 181 | LVTYSLGKFG QRALDFYSIH VTRESNHPVK PLEQIGGNSC ASGPVGKALS DACMGAVASF |
| 241 | LTKYQDIILE HQKVIKKNEK RLANLKDIAS ANGLAFPKIT LPPQPHTKEG IEAYNNVVAQ |
| 301 | IVIWVNLNLW QKLKIGRDEA KPLQRLKGFP SFPLVERQAN EVDWWDMVCN VKKLINEKKE |
| 361 | DGKVFWQNLA GYKRQEALLP YLSSEEDRKK GKKFARYQFG DLLLHLEKKH GEDWGKVYDE |
| 421 | AWERIDKKVE GLSKHIKLEE ERRSEDAQSK AALTDWLRAK ASFVIEGLKE ADKDEFCRCE |
| 481 | LKLQKWYGDL RGKPFAIEAE NSILDISGFS KQYNCAFIWQ KDGVKKLNLY LIINYFKGGK |
| 541 | LRFKKIKPEA FEANRFYTVI NKKSGEIVPM EVNFNFDDPN LIILPLAFGK RQGREFIWND |
| 601 | LLSLETGSLK LANGRVIEKT LYNRRTRQDE PALFVALTFE RREVLDSSNI KPMNLIGIDR |
| 661 | GENIPAVIAL TDPEGCPLSR FKDSLGNPTH ILRIGESYKE KQRTIQAAKE VEQRRAGGYS |
| 721 | RKYASKAKNL ADDMVRNTAR DLLYYAVTQD AMLIFENLSR GFGRQGKRTF MAERQYTRME |
| 781 | DWLTAKLAYE GLPSKTYLSK TLAQYTSKTC SNCGFTITSA DYDRVLEKLK KTATGWMTTI |
| 841 | NGKELKVEGQ ITYYNRYKRQ NVVKDLSVEL DRLSEESVNN DISSWTKGRS GEALSLLKKR |
| 901 | FSHRPVQEKF VCLNCGFETH ADEQAALNIA RSWLFLRSQE YKKYQTNKTT GNTDKRAFVE |
| 961 | TWQSFYRKKL KEVWKPAV. |

[0308] In some cases, a reference CasX protein is isolated or derived from Candidatus Sungbacteria having a sequence of

| (SEQID NO: 3 | |
|---|---|
| 1 | MDNANKPSTK SLVNITRISD HFGVTPGQVT RVFSFGIIPT KRQYAIIERW FAAVEAARER |
| 61 | LYGMLYAHFQ ENPPAYLKEK FSYETFFKGR PVLNGLRDID PTIMTSAVFT ALRHKAEGAM |
| 121 | AAFHTNHRRL FEEARKKMRE YAECLKANEA LLRGAADIDW DKIVNALRTR LNTCLAPEYD |
| 181 | AVIADFGALC AFRALIAETN ALKGAYNHAL NQMLPALVKV DEPEEAEESP RLRFFNGRIN |
| 241 | DLPKFPVAER ETPPDTETII RQLEDMARVI PDTAEILGYI HRIRHKAARR KPGSAVPLPQ |
| 301 | RVALYCAIRM ERNPEEDPST VAGHFLGEID RVCEKRRQGL VRTPFDSQIR ARYMDIISFR |
| 361 | ATLAHPDRWT EIQFLRSNAA SRRVRAETIS APFEGFSWTS NRTNPAPQYG MALAKDANAP |
| 421 | ADAPELCICL SPSSAAFSVR EKGGDLIYMR PTGGRRGKDN PGKEITWVPG SFDEYPASGV |
| 481 | ALKLRLYFGR SQARRMLTNK TWGLLSDNPR VFAANAELVG KKRNPQDRWK LFFHMVISGP |
| 541 | PPVEYLDFSS DVRSRARTVI GINRGEVNPL AYAVVSVEDG QVLEEGLLGK KEYIDQLIET |
| 601 | RRRISEYQSR EQTPPRDLRQ RVRHLQDTVL GSARAKIHSL IAFWKGILAI ERLDDQFHGR |
| 661 | EQKIIPKKTY LANKTGFMNA LSFSGAVRVD KKGNPWGGMI EIYPGGISRT CTQCGTVWLA |
| 721 | RRPKNPGHRD AMVVIPDIVD DAAATGFDNV DCDAGTVDYG ELFTLSREWV RLTPRYSRVM |
| 781 | RGTLGDLERA IRQGDDRKSR QMLELALEPQ PQWGQFFCHR CGFNGQSDVL AATNLARRAI |
| 841 | SLIRRLPDTD TPPTP. |

b. Class 2 Type V: CasX Variant Proteins

[0309] The present disclosure provides variants of a reference CasX protein (interchangeably referred to herein as “CasX variant” or “CasX variant protein”) for use in the SIRV and siAAV systems, wherein the CasX variants comprise one or more modifications in at least one domain relative to the reference CasX protein, including the sequences of SEQ ID NOS:1-3, or one or more modifications relative to another CasX variant from which it was derived; e.g. CasX 491 (SEQ ID NO: 138) or CasX 515 (SEQ ID NO: 145). Any change in amino acid sequence of a reference CasX protein that leads to an improved characteristic of the CasX protein is considered a CasX variant protein of the disclosure. For example, CasX variants can comprise one or more amino acid substitutions, insertions, deletions, or swapped domains, or any combinations thereof, relative to a reference CasX protein sequence. Any permutation of the substitution, insertion and deletion embodiments described herein can be combined to generate a CasX variant protein of the disclosure.

[0310] Exemplary improved characteristics of the CasX variant embodiments include, but are not limited to improved folding of the variant, improved binding affinity to the gRNA, improved binding affinity to the target nucleic acid, improved ability to utilize a greater spectrum of PAM sequences in the editing and/or binding of target DNA, improved unwinding of the target DNA, increased editing activity, improved editing efficiency, improved editing specificity, increased percentage of a eukaryotic genome that can be efficiently edited, increased activity of the nuclease, increased target strand loading for double strand cleavage, decreased target strand loading for single strand nicking, decreased off-target cleavage, improved binding of the non-target strand of DNA, improved protein stability, improved protein:gRNA (RNP) complex stability, improved protein solubility, improved protein:gRNA (RNP) complex solubility, improved protein yield, improved protein expression, and improved fusion characteristics, as described more fully, below. Exemplary improved characteristics are described in WO2020247882A1 and PCT/US20/36505, incorporated by reference herein. In the foregoing embodiments, the one or more of the improved characteristics of the CasX variant is at least about 1.1 to about 100,000-fold improved relative to the reference CasX protein of SEQ ID NO: 1, SEQ ID NO: 2, or SEQ ID NO: 3, when assayed in a comparable fashion. In other embodiments, the improvement is at least about 1.1-fold, at least about 2-fold, at least about 5-fold, at least about 10-fold, at least about 50-fold, at least about 100-fold, at least about 500-fold, at least about 1000-fold, at least about 5000-fold, at least about 10,000-fold, or at least about 100,000-fold compared to the reference CasX protein of SEQ ID NO: 1, SEQ ID NO: 2, or SEQ ID NO: 3, or CasX 491 (SEQ ID NO: 138) or CasX 515 (SEQ ID NO: 145) when assayed in a comparable fashion. In other embodiments, the improvement is at least about 1.1-fold, at least about 2-fold, at least about 5-fold, at least about 10-fold, at least about 50-fold, at least about 100-fold, at least about 500-fold, at least about 1000-fold, at least about 5000-fold, at least about 10,000-fold, or at least about 100,000-fold compared to the reference CasX protein of SEQ ID NO: 1, SEQ ID NO: 2, or SEQ ID NO: 3, or CasX 491 (SEQ ID NO: 138) or CasX 515 (SEQ ID NO: 145) when assayed in a comparable fashion. In other cases, the one or more improved characteristics of an RNP of the CasX variant and the gRNA variant are at least about 1.1, at least about 10, at least about 100, at least about 1000, at least about 10,000, at least about 100,000-fold or more improved relative to an RNP of the reference CasX protein of SEQ ID NO:1, SEQ ID NO:2, or SEQ ID NO:3 and the reference gRNA of SEQ ID NOS: 4-16 of Table 1 or the RNP of CasX 491 (SEQ ID NO: 138) or CasX 515 (SEQ ID NO: 145) and gRNA variants of SEQ ID NOS: of Table 2, optionally with gRNA 174 (SEQ ID NO: 2238). In other cases, the one or more of the improved characteristics of an RNP of the CasX variant and the gRNA variant are about 1.1 to 100,00-fold, about 1.1 to 10,00-fold, about 1.1 to 1,000-fold, about 1.1 to 500-fold, about 1.1 to 100-fold, about 1.1 to 50-fold, about 1.1 to 20-fold improved relative to an RNP of the reference CasX protein of SEQ ID NO:1, SEQ ID NO:2, or SEQ ID NO:3 and the reference gRNA of SEQ ID NOS: 4-16 of Table 1 or the RNP of CasX 491 (SEQ ID NO: 138) or CasX 515 (SEQ ID NO: 145) and gRNA variants of SEQ ID NOS: of Table 2, optionally with gRNA 174 (SEQ ID NO: 2238), when assayed in a comparable fashion.

[0311] An exemplary improved characteristic includes improved editing efficiency, wherein an RNP of a CasX variant and a gRNA variant exhibit an improved cleavage rate of a target nucleic acid of at least 2-fold, at least 3-fold, at least 4-fold, at least 5-fold, at lease 6-fold, at least 7-fold, at least 8-fold, or at least 10-fold or greater compared to an RNP of a reference wild-type CasX and reference gRNA, when assayed in vitro under comparable conditions, as demonstrated in the Examples, below. In some embodiments of the SIRV and siAAV, upon expression and the forming of the RNP complex, the RNP of a CasX variant and a gRNA variant at a concentration of 20 μM or less, is capable of cleaving a double stranded DNA target with an efficiency of at least 40%, at least 50%, at least 60%, at least 70%, at least 80%, at least 85%, at least 90% or at least 95%. In some embodiments, the RNP of a CasX variant and a gRNA variant at a concentration of 50 μM or less, 40 μM or less, 30 μM or less, 20 μM or less, 10 μM or less, or 5 μM or less, is capable of cleaving a double stranded DNA target with an efficiency of at least 40%, at least 50%, at least 60%, at least 70%, at least 80%, at least 85%, at least 90% or at least 95%, greatly exceeding the performance of RNP of an RNP of a reference wild-type CasX and reference gRNA. The improved editing efficiency of the CasX variants, in combination with the gRNA variants of the disclosure, make them well-suited for inclusion in the SIRV and siAAV of the disclosure compared to a reference wild-type CasX and reference gRNA.

[0312] In some embodiments, the modification of the CasX variant is a mutation in one or more amino acids of the reference CasX. In other embodiments, the modification is an insertion or substitution of a part or all of a domain from a different CasX protein. In a particular embodiment, the CasX variants of 514-791 have a NTSB and helical Ib domain of SEQ ID NO: 1, while the other domains are derived from SEQ ID NO: 2, in addition to individual modifications in select domains, described herein and, thus, the CasX variants are chimeric. In some embodiment, the disclosure provides CasX variants for use in the SIRV and siAAV wherein the CasX comprises a RuvC cleavage domain, wherein the RuvC cleavage domain comprises the sequence of amino acids 648-812 of SEQ ID NO: 2 with one or more amino acid modifications relative to said RuvC cleavage domain sequence. In some embodiments, the one or more amino acid modifications of the RuvC domain comprise a modification at a position selected from the group consisting of 1658, A708, and P793. Mutations can be introduced in any one or more domains of the reference CasX protein or in a CasX variant to result in a CasX variant, and may include, for example, deletion of part or all of one or more domains, or one or more amino acid substitutions, deletions, or insertions in any domain of the reference CasX protein or the CasX variant from which it was derived.

[0313] In some embodiments, the CasX variant protein comprises at least one modification in at least 1 domain, in at least each of 2 domains, in at least each of 3 domains, in at least each of 4 domains or in at least each of 5 domains of the reference CasX protein, including the sequences of SEQ ID NOS: 1-3, or a CasX variant from which it was derived.

[0314] In other embodiments, the disclosure provides CasX variants for use in the SIRV and siAAV wherein the CasX variants comprise at least one modification relative to another CasX variant; e.g., CasX variant 515 and 527 is a variant of CasX variant 491 and CasX variants 668 and 672 are variants of CasX 535 (see, FIG. 96). In some embodiments, the at least one modification is selected from the group consisting of an amino acid insertion, deletion, or substitution. All variants that improve one or more functions or characteristics of the CasX variant protein when compared to a reference CasX protein or the variant from which it was derived described herein are envisaged as being within the scope of the disclosure. A CasX variant can be mutagenized to create another CasX variant. In a particular embodiment, the disclosure provides variants of CasX 515 created by introducing modifications to the encoding sequence resulting in amino acid substitutions, deletions, or insertions at one or more positions in one or more domains or subdomains of CasX 515.

[0315] Suitable mutagenesis methods for generating CasX variant proteins of the disclosure may include, for example, Deep Mutational Evolution (DME), deep mutational scanning (DMS), error prone PCR, cassette mutagenesis, random mutagenesis, staggered extension PCR, gene shuffling, or domain swapping (described in PCT/US20/36506 and WO2020247883A2, incorporated by reference herein). In some embodiments, the CasX variants are designed, for example by selecting multiple desired mutations in a CasX variant identified using assays described in the Examples. In certain embodiments, the activity of a reference CasX or the CasX variant protein prior to mutagenesis is used as a benchmark against which the activity of one or more resulting CasX variants are compared, thereby measuring improvements in function of the new CasX variants.

[0316] The CasX variants of the embodiments described herein have the ability to form an RNP complex with the gRNA variants disclosed herein. The CasX variant proteins of the disclosure have an enhanced ability to efficiently edit and/or bind target DNA, when complexed with a gRNA variant as an RNP, utilizing a PAM TC motif, including PAM sequences selected from TTC, ATC, GTC, or CTC, compared to an RNP of a reference CasX protein and reference gRNA. In the foregoing, the PAM sequence is located at least 1 nucleotide 5′ to the non-target strand of the protospacer having identity with the targeting sequence of the gRNA variant in an assay system compared to the editing efficiency and/or binding of an RNP comprising a reference CasX protein and reference gRNA in a comparable assay system. In one embodiment, an RNP of a CasX variant and gRNA variant exhibits greater editing efficiency and/or binding of a target sequence in the target DNA compared to an RNP comprising a reference CasX protein and a reference gRNA in a comparable assay system, wherein the PAM sequence of the target DNA is TTC. In another embodiment, an RNP of a CasX variant and gRNA variant exhibits greater editing efficiency and/or binding of a target sequence in the target DNA compared to an RNP comprising a reference CasX protein and a reference gRNA in a comparable assay system, wherein the PAM sequence of the target DNA is ATC. In another embodiment, an RNP of a CasX variant and gRNA variant exhibits greater editing efficiency and/or binding of a target sequence in the target DNA compared to an RNP comprising a reference CasX protein and a reference gRNA in a comparable assay system, wherein the PAM sequence of the target DNA is CTC. In another embodiment, an RNP of a CasX variant and gRNA variant exhibits greater editing efficiency and/or binding of a target sequence in the target DNA compared to an RNP comprising a reference CasX protein and a reference gRNA in a comparable assay system, wherein the PAM sequence of the target DNA is GTC. In the foregoing embodiments, the increased editing efficiency and/or binding affinity for the one or more PAM sequences is at least 1.5-fold greater or more compared to the editing efficiency and/or binding affinity of an RNP of any one of the CasX proteins of SEQ ID NOS:1-3 and the gRNA of Table 1 for the PAM sequences.

[0317] The term “CasX variant” is inclusive of variants that are fusion proteins; i.e., the CasX is “fused to” a heterologous sequence. This includes CasX variants comprising CasX variant sequences and N-terminal, C-terminal, or internal fusions of the CasX to a heterologous protein or domain thereof.

[0318] In some embodiments, the CasX variant protein comprises between 400 and 2000 amino acids, between 500 and 1500 amino acids, between 700 and 1200 amino acids, between 800 and 1100 amino acids or between 900 and 1000 amino acids.

c. CasX Variant Proteins with Domains from Multiple Source Proteins

[0319] In certain embodiments, the disclosure provides a chimeric CasX protein for use in the SIRV and siAAV systems comprising protein domains from two or more different CasX proteins, such as two or more reference CasX proteins, or two or more CasX variant protein sequences as described herein, or a reference CasX protein and a CasX variant protein. As used herein, a “chimeric CasX protein” refers to a CasX containing at least two domains isolated or derived from different sources, such as two naturally occurring proteins, which may, in some embodiments, be isolated from different species. In a particular embodiment, the CasX variants of 514-791 have a NTSB and helical 1b domain derived from the sequence of SEQ ID NO: 1, while the other domains are derived from SEQ ID NO: 2, it being understood that the variants have additional amino acid changes at select locations. In another particular, embodiment, the CasX variant of 494 has a NTSB domain derived from the sequence of SEQ ID NO: 1, while the other domains are derived from SEQ ID NO: 2.

[0320] In some embodiments of the SIRV and siAAV systems, a CasX variant protein comprises at least one chimeric domain comprising a first part from a first CasX protein and a second part from a second, different CasX protein. As used herein, a “chimeric domain” refers to a domain containing at least two parts isolated or derived from different sources, such as two naturally occurring proteins or portions of domains from two reference CasX proteins, the domain coordinates of which are provided in Table 3 and the sequences of which are provided in Table 4. The at least one chimeric domain can be any of the NTSB, TSL, helical I, helical II, OBD or RuvC domains as described herein. As an example of the foregoing, the chimeric RuvC domain comprises amino acids 661 to 824 of SEQ ID NO: 1 and amino acids 922 to 978 of SEQ ID NO: 2. As an alternative example of the foregoing, a chimeric RuvC domain comprises amino acids 648 to 812 of SEQ ID NO: 2 and amino acids 935 to 986 of SEQ ID NO: 1. In the case of split or non-contiguous domains such as helical I, RuvC and OBD, a portion of the non-contiguous domain can be replaced with the corresponding portion from any other source. For example, the helical I-I domain (sometimes referred to as helical I-a) in SEQ ID NO: 2 can be replaced with the corresponding helical I-I sequence from SEQ ID NO: 1, and the like. Domain sequences from reference CasX proteins, and their coordinates, are shown in Tables 3 and 4. Representative examples of chimeric CasX proteins include the variants of CasX 472-483, 485-491 and 515, the sequences of which are set forth in Table 5.

TABLE 3
Domain coordinates in Reference CasX proteins

| | Coordinates in | Coordinates in |
|---|---|---|
| Domain Name | SEQ ID NO: 1 | SEQ ID NO: 2 |
| OBD a | 1-55 | 1-57 |
| helical I a | 56-99 | 58-101 |
| NTSB | 100-190 | 102-191 |
| helical I b | 191-331 | 192-332 |
| helical II | 332-508 | 333-500 |
| OBD b | 509-659 | 501-646 |
| RuvC a | 660-823 | 647-810 |
| TSL | 824-933 | 811-920 |
| RuvC b | 934-986 | 921-978 |

*OBD a and b, helical I a and b, and RuvC a and b are also referred to herein as OBD I and II, helical I-I and I-II, and RuvC I and II.

[0321] Exemplary domain sequences are provided in Table 4 below.

TABLE 4
Exemplary Domain Sequences in Reference
CasX proteins

| | | |
|---|---|---|
| SEQ | | |
| ID | | |
| NO | Domain | Sequence |

Deltaproteobacter sp. (reference CasX of
SEQ ID NO: 1)

| | | |
|---|---|---|
| 2338 | OBD-I | EKRINKIRKKLSADNATKPVSRSGPMKTLLVRVM |
| | | TDDLKKRLEKRRKKPEVMPQ |
| 2339 | helical | VISNNAANNLRMLLDDYTKMKEAILQVYWQEFKD |
| | I-I | DHVGLMCKFA |
| 2340 | NTSB | QPASKKIDQNKLKPEMDEKGNLTTAGFACSQCGQ |
| | | PLFVYKLEQVSEKGKAYTNYFGRCNVAEHEKLIL |
| | | LAQLKPEKDSDEAVTYSLGKFGQ |
| 2341 | helical | RALDFYSIHVTKESTHPVKPLAQIAGNRYASGPV |
| | I-II | GKALSDACMGTIASFLSKYQDIIIEHQKVVKGNQ |
| | | KRLESLRELAGKENLEYPSVTLPPQPHTKEGVDA |
| | | YNEVIARVRMWVNLNLWQ KLKLSRDDAKPLLRL |
| | | KGFPSF |
| 2342 | helical | PVVERRENEVDWWNTINEVKKLIDAKRDMGRVFW |
| | II | SGVTAEKRNTILEGYNYLPNENDHKKREGSLENP |
| | | KKPAKRQFGDLLLYLEKKYAGDWGKVFDEAWERI |
| | | DKKIAGLTSHIEREEARNAEDAQSKAVLTDWLRA |
| | | KASFVLERLKEMDEKEFYACEIQLQKWYGDLRG |
| | | NPFAVEAE |
| 2343 | OBD-II | NRVVDISGFSIGSDGHSIQYRNLLAWKYLENGKR |
| | | EFYLLMNYGKKGRIRFTDGTDIKKSGKWQGLLYG |
| | | GGKAKVIDLTFDPDDEQLIILPLAFGTRQGREFI |
| | | WNDLLSLETGLIKLANGRVIEKTIYNKKIG RDE |
| | | PALFVALTFERREVVD |
| 2344 | RuvC-I | PSNIKPVNLIGVDRGENIPAVIALTDPEGCPLPE |
| | | FKDSSGGPTDILRIGEGYKEKQRAIQAAKEVEQR |
| | | RAGGYSRKFASKSRNLADDMVRNSARDLFYHAVT |
| | | HDAVLVFENLSRGFGRQGKRTFMTERQYTKMEDW |
| | | LTAKLAYEGLTSKTYLSKTLAQYTSKTC |
| 2345 | TSL | SNCGFTITTADYDGMLVRLKKTSDGWATTLNNKE |
| | | LKAEGQITYYNRYKRQTVEKELSAELDRLSEESG |
| | | NNDISKWTKGRRDEALFLLKKRFSHRPVQEQFVC |
| | | LDCGHEVH |
| 2346 | RuvC-II | ADEQAALNIARSWLFLN SNSTEFKSYKSGKQPF |
| | | VGAWQAFYKRRLKEVWKPNA |

Planctomycetes sp. (Reference CasX of
SEQ ID NO: 2)

| | | |
|---|---|---|
| 2347 | OBD-I | QEIKRINKIRRRLVKDSNTKKAGKTGPMKTLLVR |
| | | VMTPDLRERLENLRKKPENIPQ |
| 2348 | helical | PISNTSRANLNKLLTDYTEMKKAILHVYWEEFQK |
| | I-II | DPVGLMSRVA |
| 2349 | NTSB | QPAPKNIDQRKLIPVKDGNERLTSSGFACSQCCQ |
| | | PLYVYKLEQVNDKGKPHTNYFGRCNVSEHERLIL |
| | | LSPHKPEANDELVTYSLGKFGQ |
| 2350 | helical | RALDFYSIHVTRESNHPVKPLEQIGGNSCASGPV |
| | I-II | GKALSDACMGAVASFLTKYQDIILEHQKVIKKNE |
| | | KRLANLKDIASANGLAFPKITLPPQPHTKEGIEA |
| | | YNNVVAQIVIWVNLNLWQKLKIGRDEAKPLQRLK |
| | | GFPSF |
| 2351 | helical | PLVERQANEVDWWDMVCNVKKLINEKKEDGKVFW |
| | II | QNLAGYKRQEALLPYLSSEEDRKKGKKFARYQFG |
| | | DLLLHLEKKHGEDWGKVYDEAWERIDKKVEGLSK |
| | | HIKLEEERRSEDAQSKAALTDWLRAKASFVIEGL |
| | | KEADKDEFCRCELKLQKWYGDLRGKPFAIEAE |
| 2352 | OBD-II | NSILDISGFSKQYNCAFIWQKDGVKKLNLYLIIN |
| | | YFKGGKLRFKKIKPEAFEANRFYTVINKKSGEIV |
| | | PMEVNFNFDDPNLIILPLAFGKRQGREFIWNDLL |
| | | SLETGSLKLANGRVIEKTLYNRRTRQDEPALFVA |
| | | LTFERREVLD |
| 2353 | RuvC-I | SSNIKPMNLIGIDRGENIPAVIALTDPEGCPLSR |
| | | FKDSLGNPTHILRIGESYKEKQRTIQAAKEVEQR |
| | | RAGGYSRKYASKAKNLADDMVRNTARDLLYYAVT |
| | | QDAMLIFENLSRGFGRQGKRTFMAERQYTRMED |
| | | LTAKLAYEGLPSKTYLSKTLAQYTSKTCW |
| 2354 | TSL | SNCGFTITSADYDRVLEKLKKTATGWMTTINGKE |
| | | LKVEGQITYYNRYKRQNVVKDLSVELDRLSEESV |
| | | NNDISSWTKGRSGEALSLLKKRFSHRPVQEKFVC |
| | | LNCGFETH |
| 2355 | RuvC- | ADEQAALNIARSWLFLRSQEYKKYQTNKTTGNTD |
| | II | KRAFVETWQSFYRKKLKEVWKPAV |

d. Exemplary CasX Variants

[0322] In some embodiments, a Class 2 Type V, CasX variant protein for use in the SIRV and siAAV systems comprises a sequence of SEQ ID NOS: 49-321 and 2356-2488, or a sequence as set forth in Table 5. In some embodiments, a CasX variant protein for use in the SIRV and siAAV systems comprises a sequence set forth in Table 5, including the sequences of SEQ ID NOS: 72-321 and 2356-2488. In some embodiments, a CasX variant protein consists of a sequence selected from the group consisting of SEQ ID NOS: 72-321 and 2356-2488. In other embodiments, a Class 2 Type V, CasX variant protein comprises a sequence at least 60% identical, at least 65% identical, at least 70% identical, at least 75% identical, at least 80% identical, at least 81% identical, at least 82% identical, at least 83% identical, at least 84% identical, at least 85% identical, at least 86% identical, at least 86% identical, at least 87% identical, at least 88% identical, at least 89% identical, at least 89% identical, at least 90% identical, at least 91% identical, at least 92% identical, at least 93% identical, at least 94% identical, at least 95% identical, at least 96% identical, at least 97% identical, at least 98% identical, at least 99% identical, at least 99.5% identical to a sequence selected from the group consisting of SEQ ID NOS: 49-321 and 2356-2488. In a particular embodiment, a CasX variant protein for use in the SIRV and siAAV systems comprises the sequence of SEQ ID NO: 138, or a sequence having at least about 70%, at least about 80%, at least about 80%, at least about 85%, at least about 90%, or at least about 95%, or at least about 95%, or at least about 96%, or at least about 97%, or at least about 98%, or at least about 99% sequence identity thereto. In another particular embodiment, a CasX variant protein for use in the SIRV and siAAV systems comprises the sequence of SEQ ID NO: 145, or a sequence having at least about 70%, at least about 80%, at least about 80%, at least about 85%, at least about 90%, or at least about 95%, or at least about 95%, or at least about 96%, or at least about 97%, or at least about 98%, or at least about 99% sequence identity thereto. In a particular embodiment, a CasX variant protein for use in the SIRV and siAAV systems comprises the sequence of SEQ ID NO: 303, or a sequence having at least about 70%, at least about 80%, at least about 80%, at least about 85%, at least about 90%, or at least about 95%, or at least about 95%, or at least about 96%, or at least about 97%, or at least about 98%, or at least about 99% sequence identity thereto. In exemplary embodiments, the CasX retain nuclease activity and the ability to form an RNP with a gRNA. It will be understood that in most cases, upon expression, the CasX variant will not have the N-terminal methionine due to post-translational modification.

TABLE 5
CasX Variant Sequences

| SEQ | |
|---|---|
| ID NO: | Description |
| 72 | 119 |
| 73 | substitution of L379R, a substitution of C477K, a substitution of |
| | A708K, a deletion of P at position 793 and a substitution of |
| | M771N of SEQ ID NO: 2. |
| 74 | substitution of A708K, a deletion of P at position 793 and a |
| | substitution of E386S of SEQ ID NO: 2. |
| 75 | substitution of L379R, a substitution of C477K, a substitution of |
| | A708K and a deletion of P at position 793 of SEQ ID NO: 2. |
| 76 | substitution of L792D of SEQ ID NO: 2. |
| 77 | substitution of G791F of SEQ ID NO: 2. |
| 78 | substitution of A708K, a deletion of P at position 793 and a |
| | substitution of A739V of SEQ ID NO: 2. |
| 79 | substitution of L379R, a substitution of A708K, a deletion of P |
| | at position 793 and a substitution of A739V of SEQ ID NO: 2. |
| 80 | substitution of C477K, a substitution of A708K and a deletion of |
| | P at position 793 of SEQ ID NO: 2. |
| 81 | substitution of L249I and a substitution of M771N of SEQ ID |
| | NO: 2. |
| 82 | substitution of V747K of SEQ ID NO: 2. |
| 83 | substitution of L379R, a substitution of C477K, a substitution of |
| | A708K, a deletion of P at position 793 and a substitution of |
| | M779N of SEQ ID NO: 2. |
| 84 | substitution of L379R, substitution of F755M of SEQ ID NO: 2. |
| 85 | 429 |
| 86 | 430 |
| 87 | 431 |
| 88 | 432 |
| 89 | 433 |
| 90 | 434 |
| 91 | 435 |
| 92 | 436 |
| 93 | 437 |
| 94 | 438 |
| 95 | 439 |
| 96 | 440 |
| 97 | 441 |
| 98 | 442 |
| 99 | 443 |
| 100 | 444 |
| 101 | 445 |
| 102 | 446 |
| 103 | 447 |
| 104 | 448 |
| 105 | 449 |
| 106 | 450 |
| 107 | 451 |
| 108 | 452 |
| 109 | 453 |
| 110 | 454 |
| 111 | 455 |
| 112 | 456 |
| 113 | 457 |
| 114 | 458 |
| 115 | 459 |
| 116 | 460 |
| 117 | 278 |
| 118 | 279 |
| 119 | 280 |
| 120 | 285 |
| 121 | 286 |
| 122 | 287 |
| 123 | 288 |
| 124 | 290 |
| 125 | 291 |
| 126 | 293 |
| 127 | 300 |
| 128 | 492 |
| 129 | 493 |
| 130 | 387 |
| 131 | 395 |
| 132 | 485 |
| 133 | 486 |
| 134 | 487 |
| 135 | 488 |
| 136 | 489 |
| 137 | 490 |
| 138 | 491 |
| 139 | 494 |
| 140 | 328 |
| 141 | 388 |
| 142 | 389 |
| 143 | 390 |
| 144 | 514 |
| 145 | 515 |
| 146 | 516 |
| 147 | 517 |
| 148 | 518 |
| 149 | 519 |
| 150 | 520 |
| 151 | 522 |
| 152 | 523 |
| 153 | 524 |
| 154 | 525 |
| 155 | 526 |
| 156 | 527 |
| 157 | 528 |
| 158 | 529 |
| 159 | 530 |
| 160 | 531 |
| 161 | 532 |
| 162 | 533 |
| 163 | 534 |
| 164 | 535 |
| 165 | 536 |
| 166 | 537 |
| 167 | 538 |
| 168 | 539 |
| 169 | 540 |
| 170 | 541 |
| 171 | 542 |
| 172 | 543 |
| 173 | 544 |
| 174 | 545 |
| 175 | 546 |
| 176 | 547 |
| 177 | 548 |
| 178 | 550 |
| 179 | 551 |
| 180 | 552 |
| 181 | 553 |
| 182 | 554 |
| 183 | 555 |
| 184 | 556 |
| 185 | 557 |
| 186 | 558 |
| 187 | 559 |
| 188 | 560 |
| 189 | 561 |
| 190 | 562 |
| 191 | 563 |
| 192 | 564 |
| 193 | 565 |
| 194 | 566 |
| 195 | 567 |
| 196 | 568 |
| 197 | 569 |
| 198 | 570 |
| 199 | 571 |
| 200 | 572 |
| 201 | 573 |
| 202 | 574 |
| 203 | 575 |
| 204 | 576 |
| 205 | 577 |
| 206 | 578 |
| 207 | 579 |
| 208 | 580 |
| 209 | 581 |
| 210 | 582 |
| 211 | 583 |
| 212 | 584 |
| 213 | 585 |
| 214 | 586 |
| 215 | 587 |
| 216 | 588 |
| 217 | 589 |
| 218 | 590 |
| 219 | 591 |
| 220 | 592 |
| 221 | 593 |
| 222 | 594 |
| 223 | 595 |
| 224 | 596 |
| 225 | 597 |
| 226 | 598 |
| 227 | 599 |
| 228 | 600 |
| 229 | 601 |
| 230 | 602 |
| 231 | 603 |
| 232 | 604 |
| 233 | 605 |
| 234 | 606 |
| 235 | 607 |
| 236 | 608 |
| 237 | 609 |
| 238 | 610 |
| 239 | 611 |
| 240 | 612 |
| 241 | 613 |
| 242 | 614 |
| 243 | 615 |
| 244 | 616 |
| 245 | 617 |
| 246 | 618 |
| 247 | 619 |
| 248 | 620 |
| 249 | 621 |
| 250 | 622 |
| 251 | 623 |
| 252 | 624 |
| 253 | 625 |
| 254 | 626 |
| 255 | 627 |
| 256 | 628 |
| 257 | 629 |
| 258 | 630 |
| 259 | 631 |
| 260 | 632 |
| 261 | 633 |
| 262 | 634 |
| 263 | 635 |
| 264 | 636 |
| 265 | 637 |
| 266 | 638 |
| 267 | 639 |
| 268 | 640 |
| 269 | 641 |
| 270 | 642 |
| 271 | 643 |
| 272 | 644 |
| 273 | 645 |
| 274 | 646 |
| 275 | 647 |
| 276 | 648 |
| 277 | 649 |
| 278 | 650 |
| 279 | 651 |
| 280 | 652 |
| 281 | 653 |
| 282 | 654 |
| 283 | 655 |
| 284 | 656 |
| 285 | 657 |
| 286 | 658 |
| 287 | 659 |
| 288 | 660 |
| 289 | 661 |
| 290 | 662 |
| 291 | 663 |
| 292 | 664 |
| 293 | 665 |
| 294 | 666 |
| 295 | 667 |
| 296 | 668 |
| 297 | 669 |
| 298 | 671 |
| 299 | 672 |
| 300 | 673 |
| 301 | 674 |
| 302 | 675 |
| 303 | 676 |
| 304 | 677 |
| 305 | 678 |
| 306 | 679 |
| 307 | 680 |
| 308 | 681 |
| 309 | 682 |
| 310 | 683 |
| 311 | 684 |
| 312 | 685 |
| 313 | 686 |
| 314 | 687 |
| 315 | 688 |
| 316 | 689 |
| 317 | 690 |
| 318 | 691 |
| 319 | 692 |
| 320 | 693 |
| 321 | 694 |
| 2356 | 701 |
| 2357 | 702 |
| 2358 | 703 |
| 2359 | 704 |
| 2360 | 705 |
| 2361 | 706 |
| 2362 | 707 |
| 2363 | 708 |
| 2364 | 709 |
| 2365 | 710 |
| 2366 | 711 |
| 2367 | 712 |
| 2368 | 713 |
| 2369 | 714 |
| 2370 | 715 |
| 2371 | 716 |
| 2372 | 717 |
| 2373 | 718 |
| 2374 | 719 |
| 2375 | 720 |
| 2376 | 721 |
| 2377 | 722 |
| 2378 | 723 |
| 2379 | 724 |
| 2380 | 725 |
| 2381 | 726 |
| 2382 | 727 |
| 2383 | 728 |
| 2384 | 729 |
| 2385 | 730 |
| 2386 | 731 |
| 2387 | 732 |
| 2388 | 733 |
| 2389 | 734 |
| 2390 | 735 |
| 2391 | 736 |
| 2392 | 737 |
| 2393 | 738 |
| 2394 | 739 |
| 2395 | 740 |
| 2396 | 741 |
| 2397 | 742 |
| 2398 | 743 |
| 2399 | 744 |
| 2400 | 745 |
| 2401 | 746 |
| 2402 | 747 |
| 2403 | 748 |
| 2404 | 749 |
| 2405 | 750 |
| 2406 | 751 |
| 2407 | 752 |
| 2408 | 753 |
| 2409 | 754 |
| 2410 | 755 |
| 2411 | 756 |
| 2412 | 757 |
| 2413 | 758 |
| 2414 | 759 |
| 2415 | 760 |
| 2416 | 761 |
| 2417 | 762 |
| 2418 | 763 |
| 2419 | 764 |
| 2420 | 765 |
| 2421 | 766 |
| 2422 | 767 |
| 2423 | 768 |
| 2424 | 769 |
| 2425 | 770 |
| 2426 | 777 |
| 2427 | 778 |
| 2428 | 779 |
| 2429 | 780 |
| 2430 | 781 |
| 2431 | 782 |
| 2432 | 783 |
| 2433 | 784 |
| 2434 | 785 |
| 2435 | 786 |
| 2436 | 787 |
| 2437 | 788 |
| 2438 | 789 |
| 2439 | 790 |
| 2440 | 791 |
| 2441 | 793 |
| 2442 | 794 |
| 2443 | 795 |
| 2444 | 796 |
| 2445 | 797 |
| 2446 | 798 |
| 2447 | 799 |
| 2448 | 800 |
| 2449 | 801 |
| 2450 | 802 |
| 2451 | 803 |
| 2452 | 804 |
| 2453 | 805 |
| 2454 | 806 |
| 2455 | 807 |
| 2456 | 808 |
| 2457 | 809 |
| 2458 | 810 |
| 2459 | 811 |
| 2460 | 812 |
| 2461 | 813 |
| 2462 | 814 |
| 2463 | 815 |
| 2464 | 816 |
| 2465 | 817 |
| 2466 | 818 |
| 2467 | 819 |
| 2468 | 820 |
| 2469 | 821 |
| 2470 | 822 |
| 2471 | 823 |
| 2472 | 824 |
| 2473 | 825 |
| 2474 | 826 |
| 2475 | 827 |
| 2476 | 828 |
| 2477 | 829 |
| 2478 | 830 |
| 2479 | 831 |
| 2480 | 832 |
| 2481 | 833 |
| 2482 | 834 |
| 2483 | 835 |
| 2484 | 836 |
| 2485 | 837 |
| 2486 | 838 |
| 2487 | 839 |
| 2488 | 840 |

[0323] In some embodiments, a CasX variant sequence comprises a sequence of SEQ ID NOS: 49-71, presented in the sequence listing which accompanies the instant specification.

e. Class 2 Type V, CasX Variants Derived from Other Class 2 Type V, CasX Variants

[0324] In further iterations of the generation of variant proteins, a variant protein can be utilized to generate additional CasX variants of the disclosure. For example, CasX 119 (SEQ ID NO: 72), CasX 491 (SEQ ID NO: 138), and CasX 515 (SEQ ID NO: 145) are exemplary variant proteins that are modified to generate additional CasX variants of the disclosure having improvements or additional properties relative to a reference CasX or CasX variants from which they were derived. CasX 119 contains a substitution of L379R, a substitution of A708K and a deletion of P at position 793 of SEQ ID NO: 2. CasX 491 contains an NTSB and Helical 1B domain swap from SEQ ID NO: 1. CasX 515 was derived from CasX 491 by insertion of P at position 793 (relative to SEQ ID NO: 2) and was used to create additional CasX variants. For example, CasX 668 has an insertion of R at position 26 and a substitution of G223S relative to CasX 515. CasX 672 has substitutions of L169K and G223S relative to CasX 515. CasX 676 has substitutions of L169K and G223S and an insertion of R at position 26 relative to CasX 515.

[0325] Exemplary methods used to generate and evaluate CasX variants derived from other CasX variants are described in the Examples, which were created by introducing modifications to the encoding sequence resulting in amino acid substitutions, deletions, or insertions at one or more positions in one or more domains of the CasX variant. The Examples describe the methods used to create variants of CasX 515 (SEQ ID NO: 145) that were then assayed to determine those positions in the sequence that, when modified by an amino acid insertion, deletion or substitution, resulted in an enrichment or improvement in the assays. For purposes of the disclosure, the sequences of the domains of CasX 515 are provided in Table 6 and include an OBD-I domain having the sequence of SEQ ID NO: 2489, an OBD-II domain having the sequence of SEQ ID NO: 2494, NTSB domain having the sequence of SEQ ID NO: 2491, a helical I-I domain having the sequence of SEQ ID NO: 2490, a helical I-II domain having the sequence of SEQ ID NO: 2492, a helical II domain having the sequence of SEQ ID NO: 2493, a RuvC-I domain having the sequence of SEQ ID NO: 2495, a RuvC-II domain having the sequence of SEQ ID NO: 2497, and a TSL domain having the sequence of SEQ ID NO: 2496. By the methods of the disclosure, individual positions in the domains of CasX 515 were modified, assayed, and the resulting positions and exemplary modifications leading to an enrichment or improvement that follow are provided, relative to their position in each domain or subdomain. In some cases, such positions are disclosed in Tables 49-52 of the Examples. In some embodiments, the disclosure provides CasX variants derived from CasX 515 comprising one or more modifications (i.e., an insertion, a deletion, or a substitution) at one or more amino acid positions in the NTSB domain relative to SEQ ID NO: 2491 selected from the group consisting of P2, S4, Q9, E15, G20, G33, L41, Y51, F55, L68, A70, E75, K88, and G90, wherein the modification results in an improved characteristic relative to CasX 515. In a particular embodiment, the one or more modifications at one or more amino acid positions in the NTSB domain relative to SEQ ID NO: 14533 are selected from the group consisting of \hat{ }G2, \hat{ }I4, \hat{ }L4, Q9P, E15S, G20D, [S30], G33T, L41A, Y51T, F55V, L68D, L68E, L68K, A70Y, A70S, E75A, E75D, E75P, K88Q, and G90Q (where “\hat{ }” represents and insertion and “[ ]” represents a deletion at that position). In some embodiments, the disclosure provides CasX variants derived from CasX 515 comprising one or more modifications at one or more amino acid positions in the helical I-II domain relative to SEQ ID NO: 2492 selected from the group consisting of 124, A25, Y29 G32, G44, S48, S51, Q54, 156, V63, S73, L74, K97, V100, M112, L116, G137, F138, and S140, wherein the modification results in an improved characteristic relative to CasX 515. In a particular embodiment, the one or more modifications at one or more amino acid positions in the helical I-II domain are selected from the group consisting of \hat{ }T24, \hat{ }C25, Y29F, G32Y, G32N, G32H, G32S, G32T, G32A, G32V, [G32], G32S, G32T, G44L, G44H, S48H, S48T, S51T, Q54H, I56T, V63T, S73H, L74Y, K97G, K97S, K97D, K97E, V100L, M112T, M112W, M112R, M112K, L116K, G137R, G137K, G137N, \hat{ }Q138, and S140Q. In some embodiments, the disclosure provides CasX variants derived from CasX 515 comprising one or more modifications at one or more amino acid positions in the helical II domain relative to SEQ ID NO: 2493 selected from the group consisting of L2, V3, E4, R5, Q6, A7, E9, V10, D1i, W12, W13, D14, M15, V16, C17, N18, V19, K₂O, L22, 123, E25, K26, K31, Q35, L37, A38, K41, R42, Q43, E44, L46, K57, Y65, G68, L70, L71, L72, E75, G79, D81, W82, K84, V85, Y86, D87, 193, K95, K96, E98, L100, K102, 1104, K105, E109, R110, D114, K118, A120, L121, W124, L125, R126, A127, A129, 1133, E134, G135, L136, E138, D140, K141, D142, E143, F144, C145, C147, E148, L149, K150, L151, Q152, K153, L158, E166, and A167, wherein the modification results in an improved characteristic relative to CasX 515. In a particular embodiment, the one or more modifications at one or more amino acid positions in the helical II domain are selected from the group consisting of \hat{ }A2, \hat{ }H2, [L2]+[V3], V3E, V3Q, V3F, [V3], \hat{ }D3, V3P, E4P, [E4], E4D, E4L, E4R, R5N, Q6V, \hat{ }Q6, \hat{ }G7, \hat{ }H9, \hat{ }A9, VD10, \hat{ }T10, [V10], \hat{ }F10, \hat{ }D11, [D11], D11S, [W12], W12T, W12H, \hat{ }P12, \hat{ }Q13, \hat{ }G12, \hat{ }R13, W13P, W13D, \hat{ }D13, W13L, \hat{ }P14, \hat{ }D14, [D14]+[M15], [M15], \hat{ }T16, \hat{ }P17, N18I, V19N, V19H, K20D, L22D, I23S, E25C, E25P, \hat{ }G25, K26T, K27E, K31L, K31Y, Q35D, Q35P, \hat{ }S37, [L37]+[A38], K41L, \hat{ }R42, [Q43]+[E44], L46N, K57Q, Y65T, G68M, L70V, L71C, L72D, L72N, L72W, L72Y, E75F, E75L, E75Y, G79P, \hat{ }E79, \hat{ }T81, \hat{ }R81, \hat{ }W81, \hat{ }Y81, \hat{ }W82, \hat{ }Y82, W82G, W82R, K84D, K84H, K84P, K84T, V85L, V85A, \hat{ }I85, Y86C, D87G, D87M, D87P, I93C, K95T, K96R, E98G, L100A, K102H, I104T, I104S, I104Q, K105D, \hat{ }K109, E109L, R110D, [R110], D114E, \hat{ }D114, K118P, A120R, L121T, W124L, L125C, R126D, A127E, A127L, A129T, A129K, I133E, \hat{ }C133, \hat{ }S134, \hat{ }G134, \hat{ }R135, G135P, L136K, L136D, L136S, L136H, [E138], D140R, \hat{ }D140, \hat{ }P141, \hat{ }D142, [E143]+[F144], \hat{ }Q143, F144K, [F144], [F144]+[C145], C145R, \hat{ }G145, C145K, C147D, \hat{ }V148, E148D, \hat{ }H149, L149R, K150R, L151H, Q152C, K153P, L158S, E166L, and \hat{ }F167. In some embodiments, the disclosure provides CasX variants derived from CasX 515 comprising one or more modifications at one or more amino acid positions in the RuvC-I domain relative to SEQ ID NO: 2495 selected from the group consisting of 14, K5, P6, M7, N8, L9, V12, G49, K63, K80, N83, R90, M125, and L146, wherein the modification results in an improved characteristic relative to CasX 515. In a particular embodiment, the one or more modifications at one or more amino acid positions in the RuvC-I domain are selected from the group consisting of \hat{ }I4, \hat{ }S5, \hat{ }T6, \hat{ }N6, \hat{ }R7, \hat{ }K7, \hat{ }H8, \hat{ }S8, V12L, G49W, G49R, S51R, S51K, K62S, K62T, K62E, V65A, K80E, N83G, R90H, R90G, M125S, M125A, L137Y, \hat{ }P137, [L141], L141R, L141D, \hat{ }Q142, \hat{ }R143, \hat{ }N143, E144N, \hat{ }P146, L146F, P147A, K149Q, T150V, \hat{ }R152, \hat{ }H153, T155Q, \hat{ }H155, \hat{ }R155, \hat{ }L156, [L156], \hat{ }W156, \hat{ }A157, \hat{ }F157, A157S, Q158K, [Y159], T160Y, T160F, \hat{ }I161, S161P, T163P, \hat{ }N163, C164K, and C164M. In some embodiments, the disclosure provides CasX variants derived from CasX 515 comprising one or more modifications at one or more amino acid positions in the OBD-I domain relative to SEQ ID NO: 2489 selected from the group consisting of 14, K5, P6, M7, N8, L9, V12, G49, K63, K80, N83, R90, M125, and L146, wherein the modification results in an improved characteristic relative to CasX 515. In a particular embodiment, the one or more modifications at one or more amino acid positions in the OBD-I domain are selected from the group consisting of \hat{ }G3, I3G, I3E, \hat{ }G4, K4G, K4P, K4S, K4W, K4W, R5P, \hat{ }P5, \hat{ }G5, R5S, \hat{ }S5, R5A, R5P, R5G, R5L, I6A, I6L, \hat{ }G6, N7Q, N7L, N7S, K8G, K15F, D16W, \hat{ }F16, \hat{ }F18, \hat{ }P17, M28P, M28H, V33T, R34P, M36Y, R41P, L47P, \hat{ }P48, E52P, \hat{ }P55, [P55]+[Q56], Q56S, Q56P, \hat{ }D56, \hat{ }T56, and Q56P. In some embodiments, the disclosure provides CasX variants derived from CasX 515 comprising one or more modifications at one or more amino acid positions in the OBD-II domain relative to SEQ ID NO: 2494 selected from the group consisting of 14, K5, P6, M7, N8, L9, V12, G49, K63, K80, N83, R90, M125, and L146, wherein the modification results in an improved characteristic relative to CasX 515. In a particular embodiment, the one or more modifications at one or more amino acid positions in the OBD-I domain are selected from the group consisting of [S2], I3R, I3K, [I3]+[L4], [L4], K11T, \hat{ }P24, K37G, R42E, \hat{ }S53, \hat{ }R58, [K63], M70T, I82T, Q92I, Q92F, Q92V, Q92A, \hat{ }A93, K110Q, R115Q, L121T, \hat{ }A124, \hat{ }R141, \hat{ }D143, \hat{ }A143, \hat{ }W144, and \hat{ }A145. In some embodiments, the disclosure provides CasX variants derived from CasX 515 comprising one or more modifications at one or more amino acid positions in the TSL domain relative to SEQ ID NO: 2496 selected from the group consisting of S1, N2, C3, G4, F5, 17, K18, V58, S67, T76, G78, S80, G81, E82, S85, V96, and E98, wherein the modification results in an improved characteristic relative to CasX 515. In a particular embodiment, the one or more modifications at one or more amino acid positions in the OBD-I domain are selected from the group consisting of \hat{ }M1, [N2], \hat{ }V2, C3S, \hat{ }G4, \hat{ }W4, F5P, \hat{ }W7, K18G, V58D, \hat{ }A67, T76E, T76D, T76N, G78D, [S80], [G81], \hat{ }E82, \hat{ }N82, S85I, V96C, V96T, and E98D. It will be understood that combinations of any of the same foregoing modifications of the paragraph can similarly be introduced into the CasX variants of the disclosure, resulting in a CasX variant with improved characteristics. For example, in one embodiment, the disclosure provides CasX variant 535 (SEQ ID NO: 164), which has a single mutation of G223S relative to CasX 515. In another embodiment, the disclosure provides CasX variant 668 (SEQ ID NO: 296), which has an insertion of R at position 26 and a substitution of G223S relative to CasX 515. In another embodiment, the disclosure provides CasX 672 (SEQ ID NO: 299), which has substitutions of L169K and G223S relative to CasX 515. In another embodiment, the disclosure provides CasX 676 (SEQ ID NO: 303), which has substitutions of L169K and G223S and an insertion of R at position 26 relative to CasX 515. CasX variants with improved characteristics relative to CasX 515 include variants of Table 5.

[0326] Exemplary characteristics that can be improved in CasX variant proteins relative to the same characteristics in reference CasX proteins or relative to the CasX variant from which they were derived include, but are not limited to improved folding of the variant, increased binding affinity to the gRNA, increased binding affinity to the target nucleic acid, improved ability to utilize a greater spectrum of PAM sequences in the editing and/or binding of target nucleic acid, improved unwinding of the target DNA, increased editing activity, improved editing efficiency, improved editing specificity for the target nucleic acid, decreased off-target editing or cleavage, increased percentage of a eukaryotic genome that can be efficiently edited, increased activity of the nuclease, increased target strand loading for double strand cleavage, decreased target strand loading for single strand nicking, increased binding of the non-target strand of DNA, improved protein stability, improved protein:gRNA (RNP) complex stability, and improved fusion characteristics. In a particular embodiment, as described in the Examples, such improved characteristics can include, but are not limited to, improved cleavage activity in target nucleic acids having TTC, ATC, and CTC PAM sequences, increased specificity for cleavage of a target nucleic acid sequence, and decreased off-target cleavage of a target nucleic acid.

TABLE 6
CasX 515 domain sequences

| | SEQ | |
|---|---|---|
| | ID | |
| Domain | NO | Amino Acid Sequence |
| ODB-I | 2489 | QEIKRINKIRRRLVKDSNTKKAGKTGPMKTLLVR |
| | | VMTPDLRERLENLRKKPENIPQ |
| Helical | 2490 | PISNTSRANLNKLLTDYTEMKKAILHVYWEEFQK |
| I-I | | DPVGLMSRVA |
| NTSB | 2491 | QPASKKIDQNKLKPEMDEKGNLTTAGFACSQCGQ |
| | | PLFVYKLEQVSEKGKAYTNYFGRCNVAEHEKLIL |
| | | LAQLKPEKDSDEAVTYSLGKFGQ |
| Helical | 2492 | RALDFYSIHVTKESTHPVKPLAQIAGNRYASGPV |
| I-II | | GKALSDACMGTIASFLSKYQDIIIEHQKVVKGNQ |
| | | KRLESLRELAGKENLEYPSVTLPPQPHTKEGVDA |
| | | YNEVIARVRMWVNLNLWQKLKLSRDDAKPLLRLK |
| | | GFPSF |
| Helical | 2493 | PLVERQANEVDWWDMVCNVKKLINEKKEDGKVFW |
| II | | QNLAGYKRQEALRPYLSSEEDRKKGKKFARYQLG |
| | | DLLLHLEKKHGEDWGKVYDEAWERIDKKVEGLSK |
| | | HIKLEEERRSEDAQSKAALTDWLRAKASFVIEGL |
| | | KEADKDEFCRCELKLQKWYGDLRGKPFAIEAE |
| OBD-II | 2494 | NSILDISGFSKQYNCAFIWQKDGVKKLNLYLIIN |
| | | YFKGGKLRFKKIKPEAFEANRFYTVINKKSGEIV |
| | | PMEVNFNFDDPNLIILPLAFGKRQGREFIWNDLL |
| | | SLETGSLKLANGRVIEKTLYNRRTRQDEPALFVA |
| | | LTFERREVLD |
| RuvC-I | 2495 | SSNIKPMNLIGVDRGENIPAVIALTDPEGCPLSR |
| | | FKDSLGNPTHILRIGESYKEKQRTIQAKKEVEQR |
| | | RAGGYSRKYASKAKNLADDMVRNTARDLLYYAVT |
| | | QDAMLIFENLSRGFGRQGKRTFMAERQYTRMEDW |
| | | LTAKLAYEGLPSKTYLSKTLAQYTSKTC |
| TSL | 2496 | SNCGFTITSADYDRVLEKLKKTATGWMTTINGKE |
| | | LKVEGQITYYNRYKRQNVVKDLSVELDRLSEESV |
| | | NNDISSWTKGRSGEALSLLKKRFSHRPVQEKFVC |
| | | LNCGFETH |
| RuvC-II | 2497 | ADEQAALNIARSWLFLRSQEYKKYQTNKTTGNTD |
| | | KRAFVETWQSFYRKKLKEVWKPAV |

f. CasX Fusion Proteins

[0327] In some embodiments, the disclosure provides SIRV and siAAV systems encoding CasX proteins comprising a heterologous protein fused to the CasX. In some cases, the CasX is a reference CasX protein. In other cases, the CasX is a CasX variant of any of the embodiments described herein. This includes CasX comprising N-terminal, C-terminal, or internal fusions of the CasX to a heterologous protein or domain thereof. In some embodiments, the CasX protein is fused to one or more proteins or domains thereof that has a different activity of interest, resulting in a fusion protein. For example, in some embodiments, the CasX protein is fused to a protein (or domain thereof) that inhibits transcription, modifies a target nucleic acid, or modifies a polypeptide associated with a nucleic acid (e.g., histone modification). Examples of such fusion partners contemplated for use in the CasX of the disclosure are described in WO2022120095, incorporated by reference herein.

[0328] A variety of heterologous polypeptides are suitable for inclusion in a reference CasX or CasX variant fusion protein for use in the SIRV and siAAV systems of the disclosure. In some cases, the fusion partner can modulate transcription (e.g., inhibit transcription, increase transcription) of a target DNA. For example, in some cases the fusion partner is a protein (or a domain from a protein) that inhibits transcription (e.g., a transcriptional repressor, a protein that functions via recruitment of transcription inhibitor proteins, modification of target DNA such as methylation, recruitment of a DNA modifier, modulation of histones associated with target DNA, recruitment of a histone modifier such as those that modify acetylation and/or methylation of histones, and the like). In some cases, the fusion partner is a protein (or a domain from a protein) that increases transcription (e.g., a transcription activator, a protein that acts via recruitment of transcription activator proteins, modification of target DNA such as demethylation, recruitment of a DNA modifier, modulation of histones associated with target DNA, recruitment of a histone modifier such as those that modify acetylation and/or methylation of histones, and the like).

[0329] In some cases, a fusion partner has enzymatic activity that modifies a target nucleic acid sequence; e.g., nuclease activity, methyltransferase activity, demethylase activity, DNA repair activity, DNA damage activity, deamination activity, dismutase activity, alkylation activity, depurination activity, oxidation activity, pyrimidine dimer forming activity, integrase activity, transposase activity, recombinase activity, polymerase activity, ligase activity, helicase activity, photolyase activity or glycosylase activity.

[0330] In some cases, a fusion partner has enzymatic activity that modifies a polypeptide (e.g., a histone) associated with a target nucleic acid (e.g., methyltransferase activity, demethylase activity, acetyltransferase activity, deacetylase activity, kinase activity, phosphatase activity, ubiquitin ligase activity, deubiquitinating activity, adenylation activity, deadenylation activity, SUMOylating activity, deSUMOylating activity, ribosylation activity, deribosylation activity, myristoylation activity or demyristoylation activity).

[0331] Examples of proteins (or fragments thereof) that can be used as a fusion partner to increase transcription include but are not limited to: transcriptional activators such as VP16, VP64, VP48, VP160, p65 subdomain (e.g., from NFkB), and activation domain of EDLL and/or TAL activation domain (e.g., for activity in plants); histone lysine methyltransferases such as SET1A, SET1B, MLL1 to 5, ASH1, SYMD2, NSD1, and the like; histone lysine demethylases such as JHDM2a/b, UTX, JMJD3, and the like; histone acetyltransferases such as GCN5, PCAF, CBP, p300, TAF1, TIP60/PLIP, MOZ/MYST3, MORF/MYST4, SRC1, ACTR, P160, CLOCK, and the like; and DNA demethylases such as Ten-Eleven Translocation (TET) dioxygenase 1 (TET1CD), TET1, DME, DML1, DML2, ROS1, and the like.

[0332] Examples of proteins (or fragments thereof) that can be used as a fusion partner to decrease transcription include but are not limited to: transcriptional repressors such as the Kruppel associated box (KRAB or SKD); KOX1 repression domain; the Mad mSIN3 interaction domain (SID); the ERF repressor domain (ERD), the SRDX repression domain (e.g., for repression in plants), and the like; histone lysine methyltransferases such as Pr-SET7/8, SUV4-20H1, RIZ1, and the like; histone lysine demethylases such as JMJD2A/JHDM3A, JMJD2B, JMJD2C/GASC1, JMJD2D, JARID1A/RBP2, JARID1B/PLU-1, JARID 1C/SMCX, JARID1D/SMCY, and the like; histone lysine deacetylases such as HDAC1, HDAC2, HDAC3, HDAC8, HDAC4, HDAC5, HDAC7, HDAC9, SIRT1, SIRT2, HDAC11, and the like; DNA methylases such as HhaI DNA m5c-methyltransferase (M.HhaI), DNA methyltransferase 1 (DNMT1), DNA methyltransferase 3a (DNMT3a), DNA methyltransferase 3b (DNMT3b), METI, DRM3 (plants), ZMET2, CMT1, CMT2 (plants), and the like; and periphery recruitment elements such as Lamin A, Lamin B, and the like.

[0333] In some cases, a CasX variant protein of the present disclosure for use in the SIRV systems can include an endosomal escape peptide. In some cases, an endosomal escape polypeptide comprises the amino acid sequence GLFXALLXLLXSLWXLLLXA (SEQ ID NO: 48), wherein each X is independently selected from lysine, histidine, and arginine. In some cases, an endosomal escape polypeptide comprises the amino acid sequence GLFHALLHLLHSLWHLLLHA (SEQ ID NO: 342), or HHHHHHHHH (SEQ ID NO: 343).

[0334] In some cases, a heterologous polypeptide (a fusion partner) for use in the SIRV and siAAV systems provides for subcellular localization; i.e., the heterologous polypeptide contains a subcellular localization sequence (e.g., a nuclear localization signal (NLS) for targeting to the nucleus, a sequence to keep the fusion protein out of the nucleus, e.g., a nuclear export sequence (NES), a sequence to keep the fusion protein retained in the cytoplasm, a mitochondrial localization signal for targeting to the mitochondria, a chloroplast localization signal for targeting to a chloroplast, an ER retention signal, and the like). In some embodiments, a subject RNA-guided polypeptide or a conditionally active RNA-guided polypeptide and/or subject CasX fusion protein does not include a NLS so that the protein is not targeted to the nucleus (which can be advantageous, e.g., when the target nucleic acid sequence is an RNA that is present in the cytosol). In some embodiments, a fusion partner can provide a tag (i.e., the heterologous polypeptide is a detectable label) for ease of tracking and/or purification (e.g., a fluorescent protein, e.g., green fluorescent protein (GFP), yellow fluorescent protein (YFP), red fluorescent protein (RFP), cyan fluorescent protein (CFP), mCherry, tdTomato, and the like; a histidine tag, e.g., a 6×His tag; a hemagglutinin (HA) tag; a FLAG tag; a Myc tag; and the like).

[0335] In some embodiments, sequences encoding one or more NLS are incorporated into the SIRV and siAAV constructs. In some embodiments, the one or more NLS are incorporated at or near the C-terminus of the CasX protein. In some embodiments, the one or more NLS are expressed at or near the N-terminus of the CasX protein. In other embodiments, the one or more NLS located at or near the N-terminus and at or near the C-terminus of the CasX protein.

[0336] In some cases, non-limiting examples of NLSs suitable for use with a CasX variant include sequences having at least about 80%, at least about 90%, or at least about 95% identity or are identical to sequences derived from: the NLS of the SV40 virus large T-antigen, having the amino acid sequence PKKKRKV (SEQ ID NO: 344); the NLS from nucleoplasmin (e.g., the nucleoplasmin bipartite NLS with the sequence KRPAATKKAGQAKKKK (SEQ ID NO: 345); the c-myc NLS having the amino acid sequence PAAKRVKLD (SEQ ID NO: 346) or RQRRNELKRSP (SEQ ID NO: 347); the hRNPAl M9 NLS having the sequence NQSSNFGPMKGGNFGGRSSGPYGGGGQYFAKPRNQGGY (SEQ ID NO: 348); the sequence RMRIZFKNKGKDTAELRRRRVEVSVELRKAKKDEQILKRRNV (SEQ ID NO: 349) of the IBB domain from importin-alpha; the sequences VSRKRPRP (SEQ ID NO: 350) and PPKKARED (SEQ ID NO: 351) of the myoma T protein; the sequence PQPKKKPL (SEQ ID NO: 352) of human p53; the sequence SALIKKKKKMAP (SEQ ID NO: 353) of mouse c-abl IV; the sequences DRLRR (SEQ ID NO: 354) and PKQKKRK (SEQ ID NO: 355) of the influenza virus NS1; the sequence RKLKKKIKKL (SEQ ID NO: 356) of the Hepatitis virus delta antigen; the sequence REKKKFLKRR (SEQ ID NO: 357) of the mouse Mxl protein; the sequence KRKGDEVDGVDEVAKKKSKK (SEQ ID NO: 358) of the human poly(ADP-ribose) polymerase; the sequence RKCLQAGMNLEARKTKK (SEQ ID NO: 359) of the steroid hormone receptors (human) glucocorticoid; the sequence PRPRKIPR (SEQ ID NO: 360) of Borna disease virus P protein (BDV-P1); the sequence PPRKKRTVV (SEQ ID NO: 361) of hepatitis C virus nonstructural protein (HCV-NS5A); the sequence NLSKKKKRKREK (SEQ ID NO: 362) of LEF1; the sequence RRPSRPFRKP (SEQ ID NO: 363) of ORF57 simirae; the sequence KRPRSPSS (SEQ ID NO: 364) of EBV LANA; the sequence KRGINDRNFWRGENERKTR (SEQ ID NO: 365) of Influenza A protein; the sequence PRPPKMARYDN (SEQ ID NO: 366) of human RNA helicase A (RHA); the sequence KRSFSKAF (SEQ ID NO: 367) of nucleolar RNA helicase II; the sequence KLKIKRPVK (SEQ ID NO: 368) of TUS-protein; the sequence PKKKRKVPPPPAAKRVKLD (SEQ ID NO: 369) associated with importin-alpha; the sequence PKTRRRPRRSQRKRPPT (SEQ ID NO: 370) from the Rex protein in HTLV-1; the sequence SRRRKANPTKLSENAKKLAKEVEN (SEQ ID NO: 371) from the EGL-13 protein of Caenorhabditis elegans; and the sequences KTRRRPRRSQRKRPPT (SEQ ID NO: 372), RRKKRRPRRKKRR (SEQ ID NO: 373), PKKKSRKPKKKSRK (SEQ ID NO: 374), HKKKHPDASVNFSEFSK (SEQ ID NO: 375), QRPGPYDRPQRPGPYDRP (SEQ ID NO: 376), LSPSLSPLLSPSLSPL (SEQ ID NO: 377), RGKGGKGLGKGGAKRHRK (SEQ ID NO: 378), PKRGRGRPKRGRGR (SEQ ID NO: 379), PKKKRKVPPPPAAKRVKLD (SEQ ID NO: 380), PKKKRKVPPPPKKKRKV (SEQ ID NO: 381), PAKRARRGYKC (SEQ ID NO: 382), KLGPRKATGRW (SEQ ID NO: 383), PRRKREE (SEQ ID NO: 384), PYRGRKE (SEQ ID NO: 385), PLRKRPRR (SEQ ID NO: 386), PLRKRPRRGSPLRKRPRR (SEQ ID NO: 387), PAAKRVKLDGGKRTADGSEFESPKKKRKV (SEQ ID NO: 388), PAAKRVKLDGGKRTADGSEFESPKKKRKVGIHGVPAA (SEQ ID NO: 389), PAAKRVKLDGGKRTADGSEFESPKKKRKVAEAAAKEAAAKEAAAKA (SEQ ID NO: 390), PAAKRVKLDGGKRTADGSEFESPKKKRKVPG (SEQ ID NO: 391), KRKGSPERGERKRHW (SEQ ID NO: 392), KRTADSQHSTPPKTKRKVEFEPKKKRKV (SEQ ID NO: 393), PKKKRKVGGSKRTADSQHSTPPKTKRKVEFEPKKKRKV (SEQ ID NO: 394), MAPKKKRKVSR (SEQ ID NO: 771), and MAPKKKRKVGGSPKKKRKVGGSPKKKRKVGGSPKKKRKVSR (SEQ ID NO: 772). In some cases, NLSs suitable for use with a CasX variant include sequences having at least about 80%, at least about 90%, or at least about 95% identity or are identical to SEQ ID NOS: 538-613. In some embodiments, the one or more NLS are linked to the CRISPR protein or to adjacent NLS with a linker peptide wherein the linker peptide is selected from the group consisting of RS, (G)n (SEQ ID NO: 395), (GS)n (SEQ ID NO: 396), (GSGGS)n (SEQ ID NO: 397), (GGSGGS)n (SEQ ID NO: 398), (GGGS)n (SEQ ID NO: 399), GGSG (SEQ ID NO: 400), GGSGG (SEQ ID NO: 401), GSGSG (SEQ ID NO: 402), GSGGG (SEQ ID NO: 403), GGGSG (SEQ ID NO: 404), GSSSG (SEQ ID NO: 405), GPGP (SEQ ID NO: 406), GGP, PPP, PPAPPA (SEQ ID NO: 407), PPPG (SEQ ID NO: 408), PPPGPPP (SEQ ID NO: 409), PPP(GGGS)n (SEQ ID NO: 410), (GGGS)nPPP (SEQ ID NO: 411), AEAAAKEAAAKEAAAKA (SEQ ID NO: 412), and TPPKTKRKVEFE (SEQ ID NO: 413), where n is 1 to 5. In general, NLS (or multiple NLSs) are of sufficient strength to drive accumulation of a reference or CasX variant fusion protein in the nucleus of a eukaryotic cell. Detection of accumulation in the nucleus may be performed by any suitable technique. For example, a detectable marker may be fused to a reference or CasX variant fusion protein such that location within a cell may be visualized. Cell nuclei may also be isolated from cells, the contents of which may then be analyzed by any suitable process for detecting protein, such as immunohistochemistry, western blot, or enzyme activity assay. Accumulation in the nucleus may also be determined indirectly. In some embodiments, an NLS suitable for use with a CasX variant include any of the sequences of Tables 7, 22, or 23.

[0337] The disclosure contemplates assembly of multiple NLS in various configurations for linkage to the CRISPR protein utilized in the SIRV and siAAV of the embodiments described herein. In some embodiments, 1, 2, 3, 4 or more NLS are linked by linker peptides at or near (e.g., within 50 amino acids of) the N-terminus of the CRISPR protein. In other embodiments, 1, 2, 3, 4 or more NLS are linked by linker peptides at or near (e.g., within 50 amino acids of) the C-terminus of the CRISPR protein. In some embodiments, the NLS linked to the N-terminus of the CRISPR protein are identical to the NLS linked to the C-terminus. In other embodiments, the NLS linked to the N-terminus of the CRISPR protein are different to the NLS linked to the C-terminus. In some embodiments, the NLS linked to the N-terminus of the CRISPR protein are selected from the group consisting of the N-terminal sequences as set forth in Table 7 and Table 22. In some embodiments, the NLS linked to the C-terminus of the CRISPR protein are selected from the group consisting of the C-terminal sequences as set forth in Table 7 and Table 23. Detection of accumulation in the nucleus of the CasX variant protein enhanced by the addition of NLS may be performed by any suitable technique; e.g., a detectable marker may be fused to a reference or CasX variant fusion protein such that location within a cell may be visualized by any suitable process for detecting protein, such as immunohistochemistry, Western blot, or enzyme activity assay. Accumulation in the nucleus may also be determined indirectly.

TABLE 7
NLS Sequences

| N Terminal Sequence | C Terminal Sequence |
|---|---|
| (SEQ ID NO) | (SEQ ID NO) |
| 2498 | 2545 |
| 2499 | 2546 |
| 2500 | 2547 |
| 2501 | 2548 |
| 2502 | 2549 |
| 2503 | 2550 |
| 2504 | 2551 |
| 2505 | 2552 |
| 2506 | 2553 |
| 2507 | 2554 |
| 2508 | 2555 |
| 2509 | 2556 |
| 2510 | 2557 |
| 2511 | 2558 |
| 2512 | 2559 |
| 2513 | 2560 |
| 2514 | 2561 |
| 2515 | 2562 |
| 2516 | 2563 |
| 2517 | 2564 |
| 2518 | 2565 |
| 2519 | 2566 |
| 2520 | 2567 |
| 2521 | 2568 |
| 2522 | 2569 |
| 2523 | 2570 |
| 2524 | 2571 |
| 2525 | 2572 |
| 2526 | 2573 |
| 2527 | 2574 |
| 2528 | 2575 |
| 2529 | 2576 |
| 2530 | 2577 |
| 2531 | 2578 |
| 2532 | 2579 |
| 2533 | 2580 |
| 2534 | 2581 |
| 2535 | 2582 |
| 2536 | 2583 |
| 2537 | 2584 |
| 2538 | 2585 |
| 2539 | 2586 |
| 2540 | 2587 |
| 2541 | 2588 |
| 2542 | 2589 |
| 2543 | 2590 |
| 2544 | 2591 |

[0338] In some cases, a CasX variant fusion protein for use in the SIRV and siAAV systems includes a “protein transduction domain” or PTD (also known as a CPP—cell penetrating peptide), which refers to a protein, polynucleotide, carbohydrate, or organic or inorganic compound that facilitates traversing a lipid bilayer, micelle, cell membrane, organelle membrane, or vesicle membrane. A PTD attached to another molecule, which can range from a small polar molecule to a large macromolecule and/or a nanoparticle, facilitates the molecule traversing a membrane, for example going from an extracellular space to an intracellular space, or from the cytosol to within an organelle. In some embodiments, a PTD is covalently linked to the amino terminus of a CasX variant fusion protein. In some embodiments, a PTD is covalently linked to the carboxyl terminus of a CasX variant fusion protein. In some cases, the PTD is inserted internally in the sequence of a CasX variant fusion protein at a suitable insertion site. In some cases, a CasX variant fusion protein includes (is conjugated to, is fused to) one or more PTDs (e.g., two or more, three or more, four or more PTDs). In some cases, a PTD includes one or more nuclear localization signals (NLS). Examples of PTDs include, but are not limited to, peptide transduction domain of HIV TAT comprising YGRKKRRQRRR (SEQ ID NO: 414), RKKRRQRR (SEQ ID NO: 415); YARAAARQARA (SEQ ID NO: 416); THRLPRRRRRR (SEQ ID NO: 417); and GGRRARRRRRR (SEQ ID NO: 418); a polyarginine sequence comprising a number of arginine's sufficient to direct entry into a cell (e.g., 3, 4, 5, 6, 7, 8, 9, 10, or 10-50 arginine's, SEQ ID NO: 419); a VP22 domain (Zender et al. (2002) Cancer Gene Ther. 9(6):489-96); a Drosophila Antennapedia protein transduction domain (Noguchi et al. (2003) Diabetes 52(7): 1732-1737); a truncated human calcitonin peptide (Trehin et al. (2004) Pharm. Research 21:1248-1256); polylysine (Wender et al. (2000) Proc. Natl. Acad. Sci. USA 97: 13003-13008); RRQRRTSKLMKR; Transportan GWTLNSAGYLLGKINLKALAALAKKIL (SEQ ID NO: 420); KALAWEAKLAKALAKALAKHLAKALAKALKCEA (SEQ ID NO: 421); and RQIKIWFQNRRMKWKK (SEQ ID NO: 422). In some embodiments, the PTD is an activatable CPP (ACPP) (Aguilera et al. (2009) Integr Biol (Camb) June; 1(5-6): 371-381). ACPPs comprise a polycationic CPP (e.g., Arg9 or “R9”) connected via a cleavable linker to a matching polyanion (e.g., Glu9 or “E9”), which reduces the net charge to nearly zero and thereby inhibits adhesion and uptake into cells. Upon cleavage of the linker, the polyanion is released, locally unmasking the polyarginine and its inherent adhesiveness, thus “activating” the ACPP to traverse the membrane.

[0339] In some embodiments, a CasX variant fusion protein can be linked at the C-terminal and/or N-terminal end to a heterologous polypeptide (fusion partner) via a linker polypeptide (e.g., one or more linker polypeptides). The linker polypeptide may have any of a variety of amino acid sequences. Proteins can be joined by a spacer peptide, generally of a flexible nature, although other chemical linkages are not excluded. Suitable linkers include polypeptides of between 4 amino acids and 40 amino acids in length, or between 4 amino acids and 25 amino acids in length. These linkers are generally produced by using synthetic, linker-encoding oligonucleotides to couple the proteins. Peptide linkers with a degree of flexibility can be used. The linking peptides may have virtually any amino acid sequence, bearing in mind that the preferred linkers will have a sequence that results in a generally flexible peptide. The use of small amino acids, such as glycine and alanine, are of use in creating a flexible peptide. The creation of such sequences is routine to those of skill in the art. A variety of different linkers are commercially available and are considered suitable for use. Exemplary linker polypeptides include peptides selected from the group consisting of RS, (G)n (SEQ ID NO: 395), (GS)n (SEQ ID NO: 396), (GSGGS)n (SEQ ID NO: 397), (GGSGGS)n (SEQ ID NO: 398), (GGGS)n (SEQ ID NO: 399), GGSG (SEQ ID NO: 400), GGSGG (SEQ ID NO: 401), GSGSG (SEQ ID NO: 402), GSGGG (SEQ ID NO: 403), GGGSG (SEQ ID NO: 404), GSSSG (SEQ ID NO: 405), GPGP (SEQ ID NO: 406), GGP, PPP, PPAPPA (SEQ ID NO: 407), PPPG (SEQ ID NO: 408), PPPGPPP (SEQ ID NO: 409), PPP(GGGS)n (SEQ ID NO: 410), (GGGS)nPPP (SEQ ID NO: 411), AEAAAKEAAAKEAAAKA (SEQ ID NO: 412), and TPPKTKRKVEFE (SEQ ID NO: 413), where n is 1 to 5. The ordinarily skilled artisan will recognize that design of a peptide conjugated to any elements described above can include linkers that are all or partially flexible, such that the linker can include a flexible linker as well as one or more portions that confer less flexible structure.

### VI. Self-Inactivating Viral-Derived Particle Systems Comprising SIRV

[0340] In another aspect, the present disclosure relates to use of self-inactivating viral-derived particle systems for delivery of SIRV to target cells for modification of target nucleic acid. A number of viral systems can be utilized to package, or contain the SIRV polynucleotide of the embodiments described herein. Such constructs comprise a viral capsid and an SIRV of any one of the embodiments described herein. Upon transduction and delivery of the SIRV polynucleotide to the cell, the CRISPR components, e.g., a Class 2 Type V protein and a guide RNA, are expressed and effect the desired modification of the target nucleic acid, and then via the self-inactivating mechanisms described herein, the polynucleotide is ultimately cleaved, reducing or eliminating the further expression of one or more of the CRISPR components. Non-limiting examples of viral-derived particle systems contemplated for use in the packaging of the SIRV include adeno associated virus (AAV), adenovirus, lentivirus, and gammaretrovirus.

[0341] In some embodiments, the disclosure provides siAAV comprising an AAV capsid protein and a polynucleotide comprising components selected from: i) a 5′ adeno-associated virus (AAV) inverted terminal repeat (ITR) sequence; ii) a 3′ AAV ITR sequence; iii) a sequence encoding a Class 2 Type V CRISPR protein; iv) a first promoter operably linked to the sequence encoding the Class 2 Type V CRISPR protein; v) a sequence encoding a first guide RNA (gRNA) comprising a targeting sequence that is complementary to a target nucleic acid of a cell to be modified and complementary to the one or more self-inactivating segments; vi) a second promoter sequence operably linked to the sequence encoding the first gRNA; and vii) one or more self-inactivating segments of the polynucleotide comprising a protospacer adjacent motif (PAM) sequence and a sequence capable of being bound and cleaved by a ribonuclear protein complex (RNP) of the Class 2 Type V CRISPR protein and the first gRNA, wherein the PAM sequence of the one or more self-inactivating segments is different from the PAM sequence of the target nucleic acid of the cell to be modified and promotes less efficient cleavage or rate of cleavage of the self-inactivating segment by the RNP compared to the PAM sequence 5′ and adjacent to the target nucleic acid of the cell to be modified. As previously described, the selection of the PAM sequence of the self-inactivating segments is based on the PAM sequence of the target nucleic acid sequence to be modified, the preference of the CRISPR nuclease utilized, and the rank-order of the strength of the PAM relative to the foregoing; e.g., if the PAM sequence of the target nucleic acid of the cell to be modified is TTC and the PAM preference of the Class 2 Type V CRISPR protein is TTC, then the PAM sequence of the one or more self-inactivating segments is selected from the group consisting of ATC, CTC, TTT, GTT, and GTC. In some embodiments, the polynucleotide comprising the components of (i)-(vii), above, comprises a sequence selected from the group consisting of SEQ ID NOs 4151-4156, or a sequence having at least about 70%, at least about 80%, at least about 80%, at least about 85%, at least about 90%, or at least about 95%, or at least about 95%, or at least about 96%, or at least about 97%, or at least about 98%, or at least about 99% sequence identity thereto.

[0342] In some cases, an additional feature of the siAAV is modification of the self-inactivating segment sequences to introduce mismatches relative to the targeting sequence of the gRNA. In some embodiments, the one or more self-inactivating segments each have between 1 to 5 bases different to corresponding positions in the targeting sequence of the first gRNA such that the self-inactivating segments exhibit less efficient cleavage or rate of cleavage by the RNP compared to the cleavage or rate of cleavage of the target nucleic acid. In the foregoing, the base differences of the one or more self-inactivating segments correspond to positions that are 3′ to the fourth nucleotide of the targeting sequence of the first gRNA when the two sequences are aligned. In the embodiments of the foregoing design, the one or more self-inactivating segments can be located within the transgene polynucleotide at the locations previously described, and the CRISPR nuclease, the gRNA, and the regulatory and accessory elements incorporated in the transgene can be selected from the embodiments described herein.

[0343] In another design embodiment, the disclosure provides siAAV comprising an AAV capsid protein and a polynucleotide comprising components selected from: i) a 5′ adeno-associated virus (AAV) inverted terminal repeat (ITR) sequence; ii) a 3′ AAV ITR sequence; iii) a sequence encoding a Class 2 Type V CRISPR protein; iv) a first promoter operably linked to the sequence encoding the Class 2 Type V CRISPR protein; v) a sequence encoding a first guide RNA (gRNA) comprising a targeting sequence that is complementary to a target nucleic acid of a cell to be modified; vi) a second promoter sequence operably linked to the sequence encoding the first gRNA; vii) a sequence encoding a second gRNA having a targeting sequence that is complementary to one or more self-limited segments utilized in the polynucleotide; viii) a third promoter sequence operably linked to the sequence encoding the second gRNA, and ix) one or more self-inactivating segments of the polynucleotide comprising a protospacer adjacent motif (PAM) sequence and a polynucleotide sequence having between 1 to 5 bases different to corresponding positions in the targeting sequence of the first gRNA such that the self-inactivating segments exhibit less efficient cleavage or rate of cleavage by the RNP compared to the cleavage or rate of cleavage of the target nucleic acid. In some cases, an additional feature of the foregoing siAAV design is incorporation of a PAM sequence of the one or more self-inactivating segments that is different from the PAM sequence of the target nucleic acid of the cell to be modified, with the result that the PAM promotes less efficient cleavage or rate of cleavage of the self-inactivating segment by the RNP compared to the PAM sequence 5′ and adjacent to the target nucleic acid of the cell to be modified. As previously described, the selection of the PAM sequence of the self-inactivating segments is based on the PAM sequence of the target nucleic acid sequence to be modified, the preference of the CRISPR nuclease utilized, and the rank-order of the strength of the PAM relative to the foregoing; e.g., if the PAM sequence of the target nucleic acid of the cell to be modified is TTC and the PAM preference of the Class 2 Type V CRISPR protein is TTC, then the PAM sequence of the one or more self-inactivating segments is selected from the group consisting of ATC, CTC, TTT, GTT, and GTC. In some cases, an additional feature of the foregoing siAAV design is use of a sequence of the scaffold of the second gRNA that is different than that of the first gRNA and is less efficient in promoting binding and/or editing of the self-limiting segment by the RNP compared to the binding and editing of the target nucleic acid by an RNP having the first gRNA. In some embodiments of the foregoing, the second guide scaffold comprises a sequence selected from the group consisting of SEQ ID NO: 2101-2238 and 3992-3995 and the first guide scaffold comprises a sequence selected from SEQ ID NOS: 2276-2296 and 4028 corresponding to scaffolds 215 to 235 and scaffold 316. In a particular embodiment of the foregoing, the second guide scaffold comprises the sequence of SEQ ID NO: 2238 and the first guide scaffold comprises the sequence of SEQ ID NO: 2296. In some cases, an additional feature of the foregoing siAAV design is incorporation of a third promoter wherein the sequence is different from the second promoter sequence and is less efficient at initiating transcription of the gRNA compared to the second promoter. In some embodiments, the second and the third promoters are selected from the group consisting of U6, truncated U6, sequence variants of U6, mini U6, 5S, Adenovirus 2 (Ad2) VAI, 7SK, truncated 7SK, sequence variants of 7SK, H1, truncated H1, sequence variants of H1, bidirectional H1, bidirectional U6, bidirectional 7SK, and bidirectional U6. In other embodiments, the second and the third promoters are selected from the group consisting of SEQ ID NOS: 494-513 and 2688-2708 set forth in Table 25, or a sequence having at least about 80% identical, at least about 85% identical, at least about 90% identical, at least about 91% identical, at least about 92% identical, at least about 93% identical, at least about 94% identical, at least about 95% identical, at least about 96% identical, at least about 97% identical, at least about 98% identical or at least about 99% identical thereto. In the embodiments of the foregoing design, the one or more self-inactivating segments can be located within the transgene polynucleotide at the locations previously described, and the CRISPR nuclease, the gRNA, and the regulatory and accessory elements incorporated in the transgene can be selected from the embodiments described herein.

[0344] In another design embodiment, the disclosure provides siAAV comprising an AAV capsid protein and a polynucleotide comprising components selected from: i) a 5′ adeno-associated virus (AAV) inverted terminal repeat (ITR) sequence; ii) a 3′ AAV ITR sequence; iii) a sequence encoding a Class 2 Type V CRISPR protein; iv) a first promoter operably linked to the sequence encoding the Class 2 Type V CRISPR protein; v) a sequence encoding a first guide RNA (gRNA) comprising a targeting sequence that is complementary to a target nucleic acid of a cell to be modified; vi) a second promoter sequence operably linked to the sequence encoding the first gRNA; vii) a sequence encoding a second gRNA having a targeting sequence that is complementary to one or more self-limited segments utilized in the polynucleotide, wherein the sequence of the scaffold of the second gRNA is different than that of the first gRNA and is less efficient in promoting binding and/or editing of the self-limiting segment by the RNP compared to the binding and editing of the target nucleic acid by an RNP having the first gRNA; viii) a third promoter sequence operably linked to the sequence encoding the second gRNA, and ix) one or more self-inactivating segments of the polynucleotide comprising a protospacer adjacent motif (PAM) sequence and a polynucleotide sequence capable of being bound and cleaved by a ribonuclear protein complex (RNP) of the Class 2 Type V CRISPR protein and the second gRNA. In some cases of the foregoing design, the sequence of the scaffold of the second gRNA is identical to that of the first gRNA. In some embodiments of the foregoing, the second guide scaffold comprises a sequence selected from the group consisting of SEQ ID NO: 2101-2238 and 3992-3995 and the first guide scaffold comprises a sequence selected from the group consisting of SEQ ID NOS: 2276-2296 and 4028. In a particular embodiment of the foregoing, the second guide scaffold comprises the sequence of SEQ ID NO: 2238 and the first guide scaffold comprises the sequence of SEQ ID NO: 2296. In some cases, an additional feature of the foregoing siAAV design is incorporation of a PAM sequence of the one or more self-inactivating segments that is different from the PAM sequence of the target nucleic acid of the cell to be modified, with the result, as described previously, that the PAM promotes less efficient cleavage or rate of cleavage of the self-inactivating segment by the RNP compared to the PAM sequence 5′ and adjacent to the target nucleic acid of the cell to be modified. In some cases, an additional feature of the foregoing siAAV design is modification of the self-inactivating segment sequences to introduce mismatches relative to the targeting sequence of the gRNA. In some embodiments, the one or more self-inactivating segments each have between 1 to 5 bases different to corresponding positions in the targeting sequence of the first gRNA such that the self-inactivating segments exhibit less efficient cleavage or rate of cleavage by the RNP compared to the cleavage or rate of cleavage of the target nucleic acid. In the foregoing, the base differences of the one or more self-inactivating segments correspond to positions that are 3′ to the fourth nucleotide of the targeting sequence of the first gRNA when the two sequences are aligned. In some cases, an additional feature of the foregoing siAAV design is incorporation of a third promoter wherein the sequence is different from the second promoter sequence and is less efficient at initiating transcription of the gRNA compared to the second promoter. In the foregoing, the second and the third promoter are selected from the group consisting of U6, mini U6, 5S, Adenovirus 2 (Ad2) VAI, 7SK, H1, bidirectional H1, bidirectional U6, bidirectional 7SK, and bidirectional U6, so long as the choice for the second and the third promoter is dictated by the efficiency of the promoter. In other embodiments, the second and the third promoter are selected from the group consisting of SEQ ID NOS: 494-513 and 2688-2708 set forth in Table 25, or a sequence having at least about 80% identical, at least about 85% identical, at least about 90% identical, at least about 91% identical, at least about 92% identical, at least about 93% identical, at least about 94% identical, at least about 95% identical, at least about 96% identical, at least about 97% identical, at least about 98% identical or at least about 99% identical thereto. In the embodiments of the foregoing design, the one or more self-inactivating segments can be located within the transgene polynucleotide at the locations previously described, and the CRISPR nuclease, the gRNA, and the regulatory and accessory elements incorporated in the transgene can be selected from the embodiments described herein.

[0345] In another design embodiment, the disclosure provides siAAV comprising an AAV capsid protein and a polynucleotide comprising components selected from: i) a 5′ adeno-associated virus (AAV) inverted terminal repeat (ITR) sequence; ii) a 3′ AAV ITR sequence; iii) a sequence encoding a Class 2 Type V CRISPR protein; iv) a first promoter operably linked to the sequence encoding the Class 2 Type V CRISPR protein; v) a sequence encoding a first guide RNA (gRNA) comprising a targeting sequence that is complementary to a target nucleic acid of a cell to be modified; vi) a second promoter sequence operably linked to the sequence encoding the first gRNA; vii) a sequence encoding a second gRNA having a targeting sequence that is complementary to one or more self-limited segments utilized in the polynucleotide; viii) a third promoter sequence operably linked to the sequence encoding the second gRNA wherein the sequence is different from the second promoter sequence and is less efficient at initiating transcription of the gRNA compared to the second promoter, and ix) one or more self-inactivating segments of the polynucleotide comprising a protospacer adjacent motif (PAM) sequence and a polynucleotide sequence capable of being bound and cleaved by a ribonuclear protein complex (RNP) of the Class 2 Type V CRISPR protein and the second gRNA. In some cases, an additional feature of the foregoing siAAV design is incorporation of a PAM sequence of the one or more self-inactivating segments that is different from the PAM sequence of the target nucleic acid of the cell to be modified, with the result, as previously described, that the PAM promotes less efficient cleavage or rate of cleavage of the self-inactivating segment by the RNP compared to the PAM sequence 5′ and adjacent to the target nucleic acid of the cell to be modified. In some cases, an additional feature of the foregoing siAAV design is modification of the self-inactivating segment sequences to introduce 1-5 mismatches in the sequence relative to the targeting sequence of the gRNA, as previously described. In some cases, an additional feature of the foregoing siAAV design is use of a sequence of the scaffold of the second gRNA that is different than that of the first gRNA and is less efficient in promoting binding and/or editing of the self-limiting segment by the RNP compared to the binding and editing of the target nucleic acid by an RNP having the first gRNA. In some embodiments of the foregoing, the second guide scaffold comprises a sequence selected from the group consisting of SEQ ID NO: 2101-2238 and 3992-3995 and the first guide scaffold comprises a sequence selected from SEQ ID NOS: 2276-2296 or 4028. In a particular embodiment of the foregoing, the second guide scaffold comprises the sequence of SEQ ID NO: 2238 and the first guide scaffold comprises the sequence of SEQ ID NO: 2296. In the embodiments of the foregoing design, the one or more self-inactivating segments can be located within the transgene polynucleotide at the locations previously described, and the CRISPR nuclease, the gRNA, and the regulatory and accessory elements incorporated in the transgene can be selected from the embodiments described herein.

[0346] The present disclosure provides polynucleotides for production of siAAV transgene plasmids as well as for the production of siAAV viral vectors wherein the SIRV polynucleotide is designed to include one or more self-inactivating segments integrated into the polynucleotide that, depending on additional components incorporated into the polynucleotide, result in diminished or eliminated expression of the CRISPR components. As previously described herein, the polynucleotides encoding the transgenes are specifically designed such that there is a temporal or activity difference between the capacity of the expressed CRISPR nuclease and guide RNA (gRNA), complexed as an RNP, that is capable of binding and cleaving the target nucleic acid of a cell to be modified, compared to the binding and cleaving of the self-inactivating segments utilized in the transgene that results in the self-inactivation of the construct or the reduced expression of one or more of the CRISPR components. In some embodiments, the temporal-limited expression of the CRISPR components of the siAAV; e.g., CasX and/or gRNA, is designed to reduce or eliminate unwanted off-target effects of the endonuclease activity. In other embodiments, the temporal control of the CRISPR nuclease expression imparted by the designs described herein similarly serve to lower or preclude host immune responses to the nuclease, resulting in enhanced safety and an increased therapeutic ratio of the administered composition.

[0347] The various designs of the siAAV constructs and the rationale for the mechanisms by which these differential activities are achieved were described herein, supra. The disclosure also contemplates use of different viral systems incorporating the SIRV designs in which the approaches and components are similar, if not identical, to those utilized for the siAAV, but which comprise packaging components particular to the virus system employed. For adenovirus, a key protein in the initiation of packaging is IVa2 (Ahi, Y. S., et al. Components of Adenovirus Genome Packaging. Front Microbiol. 7:1503 (2016)). In the case of lentivirus and gamma retrovirus, the key component for packaging is referred to as Ψ (psi) (Kuzembayeva, M., et al. Life of psi: How full-length HIV-1 RNAs become packaged genomes in the viral particles. Virology 454:362 (2014); Bolche, J. T., et al. Viral vector platforms within the gene therapy landscape. Signal Transduction Targeted Ther. 6: 53 (2021)).

### VII. Systems and Methods for Modification of Target Nucleic Acids

[0348] The SIRV and siAAV provided herein are useful for various applications, including therapeutics, diagnostics, and for research. To effect the methods of the disclosure for gene editing or modification, provided herein are programmable systems that are designed to edit target nucleic acid of a cell and then to self-inactivate. The programmable nature of the Class 2 Type V protein, CasX and gRNA components of the systems provided herein allows for the precise targeting to achieve the desired effect (nicking, cleaving, etc.) at one or more regions of predetermined interest in the target nucleic acid sequence. In some embodiments, the SIRV and siAAV systems provided herein comprise sequences encoding a CasX protein and a gRNA wherein the targeting sequence of the gRNA is complementary to, and therefore is capable of hybridizing with, a target nucleic acid sequence. In some cases, the SIRV and siAAV system further comprises a donor template nucleic acid. The SIRV and siAAV constructs further comprise one or more self-inactivating segments that, when cleaved by an RNP of the CRISPR nuclease and gRNA, reduce or eliminate further expression of the CRISPR components, enhancing the safety of the resulting SIRV and siAAV and reducing the potential for eliciting an immune response to the CRISPR protein.

[0349] In some embodiments of the disclosure, provided herein are methods of modifying a target nucleic acid sequence utilizing the SIRV or siAAV compositions of the disclosure. In some embodiments, the methods comprise transfecting or transducing a cell comprising the target nucleic acid sequence with an SIRV or siAAV encoding a Class 2 Type V protein, e.g, a CasX protein of the disclosure and a gRNA of the disclosure comprising a targeting sequence, wherein the targeting sequence of the gRNA has a sequence complementary to and that can hybridize with the sequence of the target nucleic acid. Upon hybridization with the target nucleic acid by the expressed CasX and the gRNA, the CasX introduces one or more single-strand breaks or double-strand breaks within or near the target nucleic acid, which may include sequences that contain regulatory elements, coding regions, or non-coding regions of the gene, that results in a permanent indel (deletion or insertion) or mutation in the target nucleic acid, as described herein, with a corresponding modulation of expression or alteration in the function of the gene product, thereby creating an edited cell. The edits can be effected by the cell's repair mechanisms, such as non-homologous end joining (NHEJ), homology-directed repair (HDR), homology-independent targeted integration (HITI), micro-homology mediated end joining (MMEJ), single strand annealing (SSA) or base excision repair (BER).

[0350] In other embodiments, the method comprises contacting a cell comprising the target nucleic acid sequence with an SIRV or siAAV encoding a plurality of gRNAs (i.e., two or more) targeted to different or overlapping portions of the target nucleic acid wherein the Class 2 Type V protein, e.g, a CasX protein introduces multiple breaks in the target nucleic acid that result in a permanent indel or mutation in the target nucleic acid, as described herein, with a corresponding modulation of expression or alteration in the function of the gene product, thereby creating an edited cell. In some embodiments, the modification of the target nucleic acid results in reduced expression of a gene product of a gene comprising the target nucleic acid, wherein expression is reduced by at least about 10%, at least about 20%, at least about 30%, at least about 40%, at least about 50%, at least about 60%, at least about 70%, at least about 80%, or at least about 90% in comparison to a cell that has not been modified. In some embodiments, the modification of the target nucleic acid results in a correction or compensation for a mutation in the gene comprising the target nucleic acid such that such that functional protein (or the gene product) is expressed by the modified cells. In some embodiments of the method, expression of the functional protein by the cells of the population is increased by at least about 10%, at least about 20%, at least about 30%, at least about 40%, at least about 50%, at least about 60%, at least about 70%, at least about 80%, or at least about 90% in comparison to a cell where the gene has not been modified. As disclosed, supra, the SIRV and siAAV polynucleotide configurations comprising the self-inactivating segments are designed to permit the editing or modification of the target nucleic acid expression of the CRISPR nuclease and guide to occur, with the less efficient self-inactivating mechanisms permitting a temporal difference between the desired editing or modification and the cleavage of the target nucleic acid and the cleavage of the self-inactivating segment polynucleotide; the latter resulting in decreased or elimination of transcription of the CRISPR components of the SIRV polynucleotide. Examples of such designs exhibiting editing or modification and subsequent inactivation are described herein, in the Examples.

[0351] In some embodiments of the method of modifying a target nucleic acid sequence using the SIRV and siAAV compositions of the embodiments, the encoded Class 2 Type V protein, CasX protein is a reference CasX selected from SEQ ID NOS: 1-3, or a CasX variant having at least 50%, at least 60%, at least 70%, at least 80%, or at least 90%, or at least 95%, or at least 99% sequence identity to the reference CasX proteins of SEQ ID NOS:1-3; embodiments of which are more fully described, supra. In some embodiments of the method, the SIRV encodes a Class 2 Type V protein, CasX variant having a sequence of any one of the sequences of SEQ ID NOS: 49-321 and 2356-2488, or a sequence having at least about 50%, at least about 60%, at least about 70%, at least about 80%, at least about 90%, or at least about 95%, or at least about 96%, or at least about 97%, or at least about 98%, or at least about 99% sequence identity thereto wherein the CasX variant protein exhibits at least one or more improved characteristics as compared to a reference CasX protein of SEQ ID NOS:1-3, and the gRNA scaffold comprises any one of the sequences of SEQ ID NOS: 2101-2331, 3992-3995, and 4028, as set forth in Table 2. In some embodiments of the method, the one or more improved characteristics of the CasX variant protein and gRNA variant are selected from the group consisting of improved folding of the CasX protein, improved binding affinity to the guide RNA, improved binding affinity to the target nucleic acid sequence, altered binding affinity to one or more PAM sequences, ability to effectively bind a greater spectrum of PAM sequences of a nucleic acid compared to reference CasX proteins, including TTC, ATC, GTC, and CTC, improved unwinding of the target nucleic acid sequence, increased activity, improved editing efficiency, improved editing specificity, increased activity of the nuclease, increased target strand loading for double strand cleavage, decreased target strand loading for single strand nicking, decreased off-target cleavage, improved binding of the non-target strand of DNA, improved protein stability, improved protein:guide RNA complex stability, improved protein solubility, improved protein:guide RNA complex solubility, improved protein expression, and improved fusion characteristics. In some embodiments of the methods, the improved characteristic of the CasX variant protein is at least about 1.1 to about 100,000-fold improved relative to the reference protein of SEQ ID NO: 1, SEQ ID NO: 2, SEQ ID NO: 3 and the reference gRNA of SEQ ID NOS: 4-16. In some embodiments, the improved characteristic of the CasX variant protein and gRNA variant is at least about 1.1, at least 1.5, at least 10, at least 50, at least 100, at least 500, at least 1,000, at least 5,000, or at least a 10,000-fold improved, as compared to a reference CasX protein of SEQ ID NO: 1, SEQ ID NO: 2, SEQ ID NO: 3 and the reference gRNA of SEQ ID NOS: 4-16.

[0352] In some embodiments of the method, the modifying of the target nucleic acid sequence is carried out in vitro inside a cell. In some embodiments, the cell is a eukaryotic cell selected from the group consisting of a rodent cell, a mouse cell, a rat cell, a primate cell, and a non-human primate cell. In particular embodiments, the eukaryotic cell is a human cell. In some embodiments of the method, the modifying of the target nucleic acid sequence is carried out in vivo in a subject. In some embodiments, the subject is selected from the group consisting of mouse, rat, pig, and non-human primate. In another embodiment, the subject is human.

[0353] In some embodiments, the method of modifying a target nucleic acid sequence comprises contacting a target nucleic acid of a cell with an SIRV or siAAV vector encoding a CasX protein, one or two gRNA, and further comprising a donor template. The donor template may be inserted into the target nucleic acid such that all, some or none of the gene product is expressed. Depending on whether the system is used to knock-down/knock-out or to knock-in a protein-coding sequence, the donor template can be a short single-stranded or double-stranded oligonucleotide, or can be a long single-stranded or double-stranded oligonucleotide. For knock-down/knock-outs, the donor template sequence need not be identical to the genomic sequence that it replaces and may contain one or more single base changes, insertions, deletions, inversions or rearrangements with respect to the genomic sequence such that expression of the gene product is reduced by at least about 10%, at least about 20%, at least about 30%, at least about 40%, at least about 50%, at least about 60%, at least about 70%, at least about 80%, or at least about 90% in comparison to target nucleic acid that has not been modified. Provided that there are arms with sufficient numbers of nucleotides having sufficient homology flanking the cleavage site(s) of the target nucleic acid sequence targeted by the CasX:gRNA (i.e., 5′ and 3′ to the cleavage site) to support homology-directed repair (“homologous arms”), use of such donor templates can result in a frame-shift or other mutation such that the gene product is not expressed or is expressed at a lower level. In some embodiments, the homologous arms comprise between 10 and 100 nucleotides, facilitating insertion of the donor template sequence by HDR. In other cases, an exogenous donor template may comprise a corrective sequence to be integrated and is flanked by an upstream homologous arm and a downstream homologous arm, each having homology to the target nucleic acid sequence that is introduced into a cell resulting in expression of functional gene product.

[0354] Introducing recombinant SIRV and siAAV vectors comprising sequences encoding the transgene components (e.g., the self-inactivating segments, CasX, gRNA, promoters and accessory components and, optionally, the donor template sequences) of the disclosure into cells under in vitro conditions can occur in any suitable culture media and under any suitable culture conditions that promote the survival of the cells and production of the CasX:gRNA. Introducing recombinant SIRV or siAAV vectors into a target cell can be carried out in vivo, in vitro or ex vivo. In some embodiments of the method, vectors may be provided directly to a target host cell such that the vectors are taken up by the cells.

VIII. Methods of Making siAAV Vectors

[0355] In other aspects, the disclosure relates to methods to produce the siAAV vectors of any of the embodiments described herein, as well as methods to express and recover the siAAV. In general, the methods include producing a polynucleotide sequence coding for the components of the expression cassette plus the flanking ITRs of any of the embodiments described herein and incorporating the encoding gene into an expression vector appropriate for a host cell. For production of the siAAV vector of any of the embodiments described herein, the methods include transforming an appropriate host cell using a two or three plasmid system with an expression vector comprising the transgene polynucleotide encoding the CRISPR components, together with a pRC plasmid comprising the Rep and Cap sequences provided in trans and the pHelper plasmid (containing essential genes such as E2A, E4 and VA), and culturing the transformed packaging host cell under conditions causing or permitting the resulting siAAV to be produced, which are recovered by methods described herein or by standard purification methods known in the art. Alternatively, the host cell genome may comprise stably integrated Rep and Cap (1 or 2) and helper genes. Suitable packaging cell lines are known to one of ordinary skill in the art, including, but not limited to HEK293, HEK293T, HeLa or A549. See for example, www.cellbiolabs.com/aav-expression-and-packaging. Methods of purifying siAAV produced by host cell lines will be known to one of ordinary skill in the art, and include, without limitation, affinity chromatography, gradient centrifugation, and ion exchange chromatography.

[0356] Standard recombinant techniques in molecular biology are used, along with the methods of the Examples, to make the polynucleotides and SIRV and siAAV vectors of the present disclosure. In accordance with the methods of the disclosure, nucleic acid sequences that encode the self-inactivating segment, reference CasX, the CasX variants, or the gRNA of any of the embodiments described herein are used to generate recombinant DNA molecules that direct the expression in appropriate host cells. Several cloning strategies are suitable for performing the methods of the present disclosure, many of which are used to generate a construct that comprises a gene coding for a composition of the present disclosure, or its complement. In some approaches, a construct is first prepared containing the DNA sequences encoding the components of the siAAV vector and transgene. Exemplary methods for the preparation of such constructs are described in the Examples. The nucleic acid sequences encoding the transgene components are inserted into the vector by a variety of procedures. In general, DNA is inserted into an appropriate restriction endonuclease site(s) using techniques known in the art. Vector components generally include, but are not limited to, one or more of a signal sequence, an origin of replication, one or more marker genes, an enhancer element, a promoter, and a transcription termination sequence. Construction of suitable vectors containing one or more of these components employs standard ligation techniques which are known to the skilled artisan. Such techniques are well known in the art and well described in the scientific and patent literature. Various vectors are publicly available. The construct is then used to create an expression vector suitable for transforming a host packaging cell, such as a eukaryotic host cell for the expression and recovery of the siAAV vector comprising the transgene. The eukaryotic host cell can be selected from BHK cells, HEK293 cells, HEK293T cells, NS0 cells, SP2/0 cells, YO myeloma cells, A549 cells, P3X63 mouse myeloma cells, PER cells, PER.C6 cells, hybridoma cells, NIH3T3 cells, COS, HeLa, CHO, or other eukaryotic cells known in the art suitable for the production of recombinant siAAV. A number of transfection techniques are generally known in the art; see, e.g., Sambrook et al. (1989) Molecular Cloning, a laboratory manual, Cold Spring Harbor Laboratories, New York. Particularly suitable transfection methods include calcium phosphate co-precipitation, direct microinjection into cultured cells, electroporation, liposome mediated gene transfer, lipid-mediated transduction, and nucleic acid delivery using high-velocity microprojectiles. Exemplary methods for the creation of expression vectors, the transformation of host cells and the expression and recovery of the nucleic acids and the siAAV vectors are described in the Examples.

[0357] The gene encoding the siAAV vector can be made in one or more steps, either fully synthetically or by synthesis combined with enzymatic processes, such as restriction enzyme-mediated cloning, PCR and overlap extension, including methods more fully described in the Examples. The methods disclosed herein can be used, for example, to ligate sequences of polynucleotides encoding the various components (e.g., self-limiting segments, ITRs, Class 2 Type V protein, e.g., a CasX, and gRNA, promoters and accessory elements) of a desired sequence to create the expression vector.

[0358] In some embodiments, host cells transduced with the above-described siAAV expression vectors are rendered capable of providing AAV helper functions in order to replicate and encapsidate the nucleotide sequences flanked by the AAV ITRs to produce siAAV viral particles. AAV helper functions are generally AAV-derived coding sequences which can be expressed to provide AAV gene products that, in turn, function in trans for productive AAV replication. AAV helper functions are used herein to complement necessary AAV functions that are missing from the AAV expression vectors. Thus, AAV helper functions include one, or both of the major AAV ORFs (open reading frames), encoding the rep and cap coding regions, or functional homologues thereof. Accessory functions can be introduced into and then expressed in host cells using methods known to those of skill in the art. Commonly, accessory functions are provided by infection of the host cells with an unrelated helper virus. In some embodiments, accessory functions are provided using an accessory function vector. Depending on the host/vector system utilized, any of a number of suitable transcription and translation control elements, including constitutive and inducible promoters, transcription enhancer elements, transcription terminators, etc., may be used in the expression vector.

[0359] In some embodiments, the nucleotide sequence encoding the CRISPR protein components of the siAAV vector is codon optimized. This type of optimization can entail a mutation of an encoding nucleotide sequence to mimic the codon preferences of the intended host organism or cell while encoding the same CRISPR protein or other protein component. Thus, the codons can be changed, but the encoded protein remains unchanged. For example, if the intended host cell was a human cell, a human codon-optimized encoding nucleotide sequence could be used. The gene design can be performed using algorithms that optimize codon usage and amino acid composition appropriate for the host cell utilized in the production of the siAAV vector. In one method of the disclosure, a library of polynucleotides encoding the components of the constructs is created and then assembled, as described above. The resulting genes are then assembled and the resulting genes used to transform a host cell and produce and recover the siAAV vector compositions for evaluation of its properties, as described herein.

[0360] In some embodiments, the present disclosure provides siAAV vectors in which the CpG motifs of the polynucleotide of the siAAV are reduced or eliminated. By reducing or eliminating the CpG motifs, the immunogenicity of the siAAV is reduced, while retaining their functional characteristics. In particular, CpG dinucleotide motifs (CpG PAMPs) in AAV vectors are immunostimulatory because of their high degree of hypomethylation, relative to mammalian CpG motifs, which have a high degree of methylation. Accordingly, reducing the frequency of unmethylated CpGs in rAAV vector genomes to a level below the threshold that activates human TLR9 is expected to reduce the immune response to exogenously administered AAV-based biologics. In some embodiments, the CpG motifs are reduced or eliminated in the nucleic acid sequences of one or more components of the siAAV selected from the group consisting 5′ ITR, 3′ ITR, Pol III promoter, Pol II promoter, encoding sequence for CRISPR nuclease, encoding sequence for gRNA, accessory element, and poly(A) signal. In some embodiments, the present disclosure provides rAAV vectors wherein one or more components of the transgene are codon-optimized for depletion of CpG dinucleotides by the substitution of homologous nucleotide sequences from mammalian species, wherein the one or more components substantially retain their functional properties upon expression in a transduced cell; e.g., ability to drive expression of the CRISPR nuclease, ability to drive expression of the gRNA, enhance the expression of the CRISPR nuclease and/or the gRNA, and enhanced ability to edit a target nucleic acid sequence. In some embodiments, the present disclosure provides siAAV vectors wherein the transgene comprises less than about 10%, less than about 5%, or less than about 1% CpG dinucleotides. In some embodiments, the present disclosure provides siAAV vectors wherein the one or more siAAV component sequences codon-optimized for depletion of CpG dinucleotides are selected from the group of sequences consisting of SEQ ID NOS: 2904-2915, 2917-2919, 4021-4027, and 4029-4050, or a sequence having at least about 80%, at least about 90%, at least about 95%, at least about 96%, at least about 97%, at least about 98%, or at least about 99% sequence identity thereto.

[0361] The siAAV vectors used for providing the nucleic acids encoding gRNAs and the CRISPR proteins, as well as the self-inactivating segments, to a target host cell can include regulatory elements such as suitable promoters or other accessory elements for driving the expression, that is, transcriptional activation of the nucleic acid of interest. In some cases, the encoding nucleic acid of interest will be operably linked to a promoter. In some embodiments, each component (i.e., the CasX and the one or more gRNA) will have a linked promoter chosen to optimize or tailor the transcription of the encoding nucleic acid. This may include ubiquitously acting promoters, for example, the CMV-beta-actin promoter, or inducible promoters, such as promoters that are active in particular cell populations or that respond to the presence of drugs such as tetracycline or kanamycin. By transcriptional activation, it is intended that transcription will be increased above basal levels in the target host cell comprising the vector by at least about 10-fold, by at least about 100-fold, more usually by at least about 1000-fold. In addition, vectors used for providing a nucleic acid encoding a gRNA and/or a CasX protein to a cell may include nucleic acid sequences that encode for selectable markers in the target cells, so as to identify cells that have taken up the CasX protein and/or the gRNA.

[0362] In some cases, the promoter is a constitutively active promoter. In some cases, the promoter is a regulatable promoter. In some cases, the promoter is an inducible promoter. In some cases, the promoter is a tissue-specific promoter.

[0363] In some embodiments, the promoter is a bidirectional promoter able to control initiation of transcription of two encoded components of the SIRV construct; e.g., two guide RNAs or a gRNA and a CRISPR nuclease. Bidirectional promoters are known in the art (WO2005/035718 and PCT/US2004/032158, incorporated by reference herein), as well as those described in the Examples.

[0364] Non-limiting examples of promoters functional in the siAAV constructs include EF-1alpha, EF-1alpha core promoter, Jens Tornoe (JeT), promoters from cytomegalovirus (CMV), CMV immediate early (CMVIE), CMV enhancer, herpes simplex virus (HSV) thymidine kinase, early and late simian virus 40 (SV40), the SV40 enhancer, long terminal repeats (LTRs) from retrovirus, mouse metallothionein-I, adenovirus major late promoter (Ad MLP), CMV promoter full-length promoter, the minimal CMV promoter, the chicken 3-actin promoter (CBA), CBA hybrid (CBh), chicken β-actin promoter with cytomegalovirus enhancer (CB7), chicken beta-Actin promoter and rabbit beta-Globin splice acceptor site fusion (CAG), the rous sarcoma virus (RSV) promoter, the HIV-Ltr promoter, the hPGK promoter, the HSV TK promoter, a 7SK promoter, the Mini-TK promoter, the human synapsin I (SYN) promoter which confers neuron-specific expression, beta-actin promoter, super core promoter 1 (SCP1), the Mecp2 promoter for selective expression in neurons, the minimal IL-2 promoter, the Rous sarcoma virus enhancer/promoter (single), the spleen focus-forming virus long terminal repeat (LTR) promoter, the TBG promoter, promoter from the human thyroxine-binding globulin gene (Liver specific), the PGK promoter, the human ubiquitin C promoter (UBC), the UCOE promoter (Promoter of HNRPA2B1-CBX3), the synthetic CAG promoter, the Histone H2 promoter, the Histone H3 promoter, the U1a1 small nuclear RNA promoter (226 nt), the U1a1 small nuclear RNA promoter (226 nt), the Ulb2 small nuclear RNA promoter (246 nt) 26, the GUSB promoter, the CBh promoter, rhodopsin (Rho) promoter, silencing-prone spleen focus forming virus (SFFV) promoter, a human H1 promoter (H1), a POL1 promoter, the TTR minimal enhancer/promoter, the b-kinesin promoter, mouse mammary tumor virus long terminal repeat (LTR) promoter, the human eukaryotic initiation factor 4A (EIF4A1) promoter, the ROSA26 promoter, the glyceraldehyde 3-phosphate dehydrogenase (GAPDH) promoter, tRNA promoters, and truncated versions and sequence variants of the foregoing. In some embodiments, the promoters used to promote transcription of the gRNA include U6 (Kunkel, G R et al. U6 small nuclear RNA is transcribed by RNA polymerase III. Proc Natl Acad Sci USA. 83(22):8575 (1986)), U6 truncated promoters, U6 bidirectional promoters, mini U6 promoters, 5S promoter, Adenovirus 2 (Ad2) VAI promoter, 7SK promoter, H1 promoter, bidirectional H1 promoter, bidirectional 7SK promoter, bidirectional U6 promoter, and sequence variants thereof. Exemplary sequences are presented as SEQ ID NOS: 425-431, 463-513, and 2688-2708 as set forth in Tables 8, 10, 11, and 25.

[0365] Selection of the appropriate promoter is well within the level of ordinary skill in the art, as it relates to controlling expression, e.g., for modifying the SIRV transgene or the target nucleic acid. The expression vector may also contain a ribosome binding site for translation initiation and a transcription terminator. The expression vector may also include appropriate sequences for amplifying expression. The expression vector may also include nucleotide sequences encoding protein tags (e.g., 6×His tag, hemagglutinin tag, fluorescent protein, etc.) that can be fused to the CasX protein, thus resulting in a chimeric CasX protein that are used for purification or detection.

[0366] In a feature of the siAAV design, promoters and regulatory elements incorporated into the transgene for the control of transcription of the individual components are chosen to achieve differential levels of transcription activation in order to obtain the desired functional outcome for the expressed component. In the case of constructs incorporating shRNA to control translation of the CRISPR protein in packaging cells (discussed more fully, below), a strong promoter, such as EF-1α, native U6, H1, and 7SK or other pol III or pol II promoters known in the art to be strong, can be utilized to ensure that the shRNA is transcribed in sufficient quantities to knock-down translation of the CRISPR protein.

[0367] In the case of constructs intended for specific tissues, tissue-specific promoters and enhancers can be utilized. Non-limiting examples of tissue-specific promoters are provided as SEQ ID NOS: 425-431 in Table 8. In some cases, the promoter is a cell type-specific promoter. In some cases, the promoter is functional in a targeted cell type or targeted cell population.

TABLE 8
Tissue-specific promoters

| Name | SEQ ID NO: |
|---|---|
| p69.hRHO536 | 425 |
| p69.hRHO 536-SV40. | 426 |
| p69.hRHO536-CAG(no RBI). | 427 |
| p69.hGRK93-SV40. | 428 |
| p69.MeP426 SV40 NLS | 429 |
| p69.MeP426 cmyc NLS | 430 |
| p69.Mecp2 | 431 |

[0368] In some embodiments, promoters for siAAV constructs intended for use in muscle can include Desmin, CK8e, MHCK7, or MHCK to control translation of the CRISPR protein. In some embodiments, enhancers for siAAV constructs intended for use in muscle can include a sequence selected from the group consisting of SEQ ID NOS: 3779-3809. In some embodiments, promoters for siAAV constructs intended for use in the eye can include RHO, RH0535-CAG, RHO-intron, endogenous G-coupled Rhodopsin Kinase 1 (GRK1), GRK1-SV40, or GRK1-CAG. In the case of siAAV designs incorporating a second gRNA that targets the self-inactivating segments, a weaker promoter can be utilized such that the transcription of the second gRNA is delayed or reduced in comparison to the expression of the CRISPR protein and first guide intended for gene editing, such that inactivation of CRISPR components does not occur prematurely before the desired gene editing has occurred. A non-limiting example of a weaker promoter is a truncated U6 promoter or a sequence variant of a U6 promoter. In an alternative approach, in some embodiments the siAAV comprises a second gRNA that targets the self-inactivating segments wherein the gRNA is less efficient at promoting cleavage when incorporated into an RNP compared to the first gRNA of the construct. A non-limiting example of a less efficient gRNA is gRNA 64 (SEQ ID NO: 2106) compared to gRNA 174 (SEQ ID NO: 2238) or gRNA 225 (SEQ ID NO: 2286), or gRNA 174 (SEQ ID NO: 2238) compared to gRNA 225 (SEQ ID NO: 2286). In such designs, the cleavage of the self-inactivating segment is delayed or reduced, thereby increasing the ability of the CRISPR protein and first guide to effect the intended gene editing of the target nucleic acid prior to the cleavage of the self-inactivating segment.

[0369] In some embodiments, the disclosure provides siAAV constructs in which the promoters of the transgene driving the expression of the gRNA are placed in either in the forward or reverse orientation (see, e.g., FIGS. 35, 36, 104 and 112) in order to control modulation of expression in siAAV constructs that contain one or multiple guides. It will be understood that in such cases where the promoter is placed in a reverse orientation, the gRNA are expressed from the antisense strand of the episome, while promoter in a forward orientation would express the gRNA from the sense strand.

[0370] Exemplary accessory elements for inclusion in the polynucleotide of the siAAV construct include a transcription enhancer element, a transcription termination signal, internal ribosome entry site (IRES) or P2A peptide to permit translation of multiple genes from a single transcript, polyadenylation sequences to promote downstream transcriptional termination, sequences for optimization of initiation of translation, and translation termination sequences. In some embodiments, the accessory element is selected from the group consisting of a poly(A) signal, a gene enhancer element, an intron, a posttranscriptional regulatory element (PTRE), a deaminase, a DNA glycosylase inhibitor, a stimulator of CRISPR-mediated homology-directed repair, an activator or repressor of transcription, and a self-cleaving sequence. In some embodiments, the PTRE is selected from the group consisting of cytomegalovirus immediate/early intronA, hepatitis B virus PRE (HPRE), Woodchuck Hepatitis virus PRE (WPRE), and 5′ untranslated segment (UTR) of human heat shock protein 70 mRNA (Hsp70). Representative, non-limiting examples of promoters and accessory element sequences suitable for incorporation into the siAAV constructs of the disclosure include the promoters of Tables 8, 10, 11, 25, 54-55, and 57-58, the poly(A) signal sequences of Tables 12 and 15, and SEQ ID NOS: 2991-3991, the PTRE of Table 18, enhancers linked to core promoters of Table 16, the NLS of Tables 7, 22, and 23, and the introns of Table 24.

[0371] The recombinant expression vectors of the disclosure can also comprise elements that facilitate robust expression or repress expression of the siAAV transgene components of the disclosure (e.g., the self-inactivating segments, Class 2 Type V protein, e.g, a CasX, or the gRNA). For example, recombinant expression vectors can include one or more of a polyadenylation (poly(A)) signal, an intronic sequence or a post-transcriptional accessory element such as a woodchuck hepatitis post-transcriptional regulatory element (PTRE). Exemplary poly(A) signal sequences include hGH poly(A) signal (short), HSV TK poly(A) signal, synthetic polyadenylation signals, SV40 poly(A) signal, β-globin poly(A) signal and the like, including the sequences of SEQ ID NOS: 514-523 as set forth in Table 12, SEQ ID NOS: 2710-2859, and SEQ ID NOS: 2991-3991. In some embodiments, the vectors of the disclosure comprise one or more sequences comprising PTRE selected from the group consisting of SEQ ID NOS: 524-526 set forth in Table 18. A person of ordinary skill in the art will be able to select suitable elements to include in the recombinant expression vectors described herein.

[0372] In some embodiments of the method, host cells transduced with the above-described siAAV expression vectors are rendered capable of providing AAV helper functions in order to replicate and encapsidate the nucleotide sequences flanked by the AAV ITRs to produce rAAV viral particles. AAV helper functions are generally AAV-derived coding sequences which can be expressed to provide AAV gene products that, in turn, function in trans for productive AAV replication. AAV helper functions are used herein to complement necessary AAV functions that are missing from the AAV expression vectors. Thus, AAV helper functions include one, or both of the major AAV ORFs (open reading frames) encoding the rep and cap coding regions, or functional homologues thereof. Accessory functions can be introduced into and then expressed in host cells using methods known to those of skill in the art. Commonly, accessory functions are provided by infection of the host cells with an unrelated helper virus. In some embodiments, accessory functions are provided using an accessory function vector. Depending on the host/vector system utilized, any of a number of suitable transcription and translation accessory elements, including constitutive and inducible promoters, transcription enhancer elements, transcription terminators, etc., may be used in the expression vector.

### IX. Therapeutic Methods

[0373] The present disclosure provides methods of treating a disease in a subject in need thereof. In some embodiments, the methods of the disclosure can prevent, treat and/or ameliorate a genetic disease of a subject by the administering to the subject of an siAAV composition of the disclosure. In some embodiments, the composition administered to the subject further comprises a pharmaceutically acceptable carrier, diluent or excipient.

[0374] In some embodiments, the disclosure provides methods of treating a disease in a subject having a mutation or a sequence that results in a cellular or physiologic abnormality in cells of the subject, the modifying comprising administering to the subject a therapeutically effective dose of an siAAV vector of any of the embodiments described herein wherein the targeting sequence of the encoded gRNA has a sequence that hybridizes with the target nucleic acid, resulting in the modification of the target nucleic acid by the CasX protein. In some embodiments of the method, the modified target nucleic acid comprises a single-stranded break, resulting in a mutation, an insertion, or a deletion effected by the repair mechanisms of the cell. In other embodiments of the method, the modified target nucleic acid comprises a double-stranded break, resulting in a mutation, an insertion, or a deletion effected by the repair mechanisms of the cell. For example, the expressed CasX:gRNA RNP can introduce into the cell an indel; e.g., a frameshift mutation, at or near the initiation point of the gene.

[0375] In other embodiments, the method of treatment comprises administering to the subject a therapeutically effective dose of an siAAV vector encoding a plurality (e.g., two or more) of gRNAs targeted to different or overlapping regions of the target nucleic acid with one or more mutations or duplications. In the foregoing, the resulting modification can be an insertion, deletion, substitution, duplication, or inversion of one or more nucleotides as compared to the target nucleic acid sequence.

[0376] In other embodiments, the methods of treating a disease in a subject in need thereof comprise administering to the subject a therapeutically effective dose of an siAAV vector of any of the embodiments described herein wherein the targeting sequence of the encoded gRNA has a sequence that hybridizes with the target nucleic acid and wherein the siAAV further comprises a donor template comprises one or more mutations or a heterologous sequence that is inserted into or replaces the target nucleic acid sequence to knock-down or knock-out the gene comprising the target nucleic acid. In the foregoing, the insertion of the donor template serves to disrupt expression of the gene and the resulting gene product. In some embodiments of the foregoing methods, the donor DNA template ranges in size from 10-1,000 nucleotides. In other embodiments of the foregoing methods, the donor template ranges in size from 100-500 nucleotides. In some cases, the donor template is a single-stranded RNA or DNA template.

[0377] In other embodiments, the methods of treating a disease in a subject in need thereof comprise administering to the subject a therapeutically effective dose of a lipid nanoparticle (LNP) comprising the SIRV of any of the embodiments described herein wherein the targeting sequence of the encoded gRNA has a sequence that hybridizes with the target nucleic acid resulting in the modification of the target nucleic acid by the CasX protein.

[0378] The modified cells of the treated subject can be a eukaryotic cell selected from the group consisting of a rodent cell, a mouse cell, a rat cell, a primate cell, and a non-human primate cell. In some embodiments, the eukaryotic cells of the treated subject is a human cell.

[0379] In some embodiments, the method comprises administering to the subject the siAAV vector of the embodiments described herein via an administration route selected from the group consisting of subcutaneous, intradermal, intraneural, intranodal, intramedullary, intramuscular, intralumbar, intrathecal, subarachnoid, intraventricular, intracapsular, intravenous, intraarterial, intralymphatical, intraocular or intraperitoneal routes, wherein the administering method is injection, transfusion, or implantation. In some embodiments of the methods of treating a disease in a subject, the subject is selected from the group consisting of mouse, rat, pig, non-human primate, and human. In a particular embodiment, the subject is a human.

[0380] In some embodiments of the method of treatment, the siAAV vector is administered at a dose of at least about 1×10⁵ vector genomes/kg (vg), at least about 1×10⁶ vg/kg, at least about 1×10⁷ vg/kg, at least about 1×10⁸ vg/kg, at least about 1×10⁹ vg/kg, at least about 1×10¹⁰ vg/kg, at least about 1×10¹¹ vg/kg, at least about 1×10¹² vg/kg, at least about 1×10¹³ vg/kg, at least about 1×10¹⁴ vg/kg, at least about 1×10¹⁵ vg/kg, at least about 1×10⁶ vg/kg. In other embodiments of the method of treatment, the siAAV vector is administered to a subject at a dose of at least about 1×10⁵ vg/kg to about 1×10¹⁶ vg/kg, at least about 1×10⁶ vg/kg to about 1×10¹⁵ vg/kg, or at least about 1×10⁷ vg/kg to about 1×10¹⁴ vg/kg.

[0381] A number of therapeutic strategies have been used to design the compositions for use in the methods of treatment of a subject with a disease. In some embodiments, the invention provides a method of treatment of a subject having a disease, the method comprising administering to the subject an siAAV vector of any of the embodiments disclosed herein according to a treatment regimen comprising one or more consecutive doses using a therapeutically effective dose. In some embodiments of the treatment regimen, the therapeutically effective dose of the siAAV vector is administered as a single dose. In other embodiments of the treatment regimen, the therapeutically effective dose is administered to the subject as two or more doses over a period of at least two weeks, or at least one month, or at least two months, or at least three months, or at least four months, or at least five months, or at least six months. In some embodiments of the treatment regiment, the effective doses are administered by a route selected from the group consisting of subcutaneous, intradermal, intraneural, intranodal, intramedullary, intramuscular, intralumbar, intrathecal, subarachnoid, intraventricular, intracapsular, intravenous, intraarterial, intralymphatical, intraocular, subretinal, intravitreal, or intraperitoneal routes, wherein the administering method is injection, transfusion, or implantation.

[0382] In some embodiments, the administering of the therapeutically effective amount of an siAAV vector to knock down or knock out expression of a gene having one or more mutations leads to the prevention or amelioration of the underlying disease such that an improvement is observed in the subject, notwithstanding that the subject may still be afflicted with the underlying disease. In some embodiments, the administration of the therapeutically effective amount of the siAAV vector leads to an improvement in at least one clinically-relevant parameter for the disease. In some embodiments of the method of treatment, the subject is selected from mouse, rat, pig, dog, and non-human primate. In a particular embodiment, the subject is human.

X. Controlled Production of siAAV Utilizing shRNA

[0383] In another aspect, the present disclosure relates to polynucleotide constructs specifically designed to produce siAAV in eukaryotic packaging cells transfected with the plasmids encoding the siAAV while repressing the degradation of the CRISPR nuclease that would otherwise occur due to the self-inactivating features of the constructs.

[0384] In some embodiments, the disclosure provides systems of polynucleotides comprising sequences encoding short-hairpin RNA (shRNA) that are processed by the eukaryotic packaging cells into small interfering RNA (siRNA) that are complementary to portions of the Class 2, Type V CRISPR mRNA expressed by the packaging cells, wherein the intracellular processing mechanisms of the cell result in the cleavage of the mRNA such that the expression by translation of the CRISPR protein is repressed. As used herein, the term “repressed” or “repression” includes partial reduction or complete extinction or silencing of expression.

[0385] In the embodiments of the system, the expressed shRNA is transcribed and folds within the nucleus of the packaging cells into a short hairpin form that is first processed by the ribonuclease Drosha into pre-siRNA. Next, the pre-siRNA is transported into the cytoplasm, whereupon the pre-siRNA interacts with the endoribonuclease Dicer that processes the double-stranded shRNA into short double-stranded RNA fragments called small interfering RNA (siRNA). A typical siRNA is composed of a passenger strand, and a complementary guide strand, typically 21 nucleotides (nt) in length with 3′ overhangs containing two nucleotides. The guide strand directs binding to a sequence-complementary mRNA, which triggers cleavage by Ago2, resulting in gene silencing (Valenzuela, R., et al. Guide Strand 3′-End Modifications Regulate siRNA Specificity. Chembiochem. 2016 Dec. 14; 17(24): 2340 (2016)). In the context of the present disclosure, the siRNA forms a complex with the RISC protein complex that recruits the siRNA to hybridize with the CRISPR mRNA transcribed from the siAAV transgene, resulting in the targeted cleavage of the CRISPR mRNA such that expression of the CRISPR protein is repressed. In some embodiments, the disclosure provides a polynucleotide, wherein the polynucleotide encodes a shRNA operably linked to a promoter. The encoding sequence and the promoter can be incorporated into different plasmid vectors utilized with the siAAV system, as shown in FIG. 72, to transfect the host packaging cell. In some embodiments, the polynucleotide comprises both the sequence encoding the shRNA and linked promoter and the siAAV transgene, having the general configuration as shown in FIG. 72 and is used to transfect the host packaging cell, along with the pRC and pHelper vectors. In other embodiments, the sequence encoding the shRNA and linked promoter is introduced into the pRC plasmid. In other embodiments, the sequence encoding the shRNA and linked promoter is introduced into the pHelper plasmid. In other embodiments, the sequence encoding the shRNA and linked promoter is introduced into the packaging cell using a separate vector from the AAV transgene vector, while the pRC and pHelper vectors are also transfected into the packaging cell. In other embodiments, the sequence encoding the shRNA is integrated into the packaging cell genome, and the packaging cell is transfected with the AAV transgene and the pRC and pHelper vectors. In still another embodiment, the sequences encoding the shRNA, Rep, Cap, E2, and VA are integrated into the packaging cell genome and the AAV transgene is transfected into the packaging cell. In other embodiments, the polynucleotide comprises a sequence encoding a first shRNA and linked promoter, a second shRNA and linked promoter, and the siAAV transgene. In other embodiments, the polynucleotide comprises a sequence encoding a first shRNA and linked promoter, a second shRNA and linked promoter, a third shRNA and linked promoter, and the siAAV transgene. In other embodiments, the system provides two polynucleotides: a first polynucleotide comprising the gene encodes the shRNA operably linked to a promoter (and, optionally, a second and a third shRNA with operably linked promoters) and a second polynucleotide of the siAAV transgene, having the general configuration as shown in FIG. 72. Designs of such constructs and their resulting properties are provided in the Examples. In some embodiments, upon introduction of the polynucleotide into a host cell, the expressed shRNA of the system is processed into siRNA complementary to a mRNA transcript of the CRISPR protein of the transgene. In a particular embodiment. upon introduction of the polynucleotide into a host cell, the expressed shRNA of the system is processed into siRNA complementary to a mRNA transcript of a CasX protein of any of the embodiments disclosed herein, including the sequences of SEQ ID NOs: 1-3, and the sequence of SEQ ID NOS: 49-321 and 2356-2488, or as set forth in Table 5.

[0386] In some embodiments, the shRNA(s) of the system are encoded by DNA sequences selected from the group consisting of SEQ ID NOS: 2640-2687 as set forth in Table 9, or a sequence having at least about 85%, at least about 90%, or at least about 95%, or at least about 95%, or at least about 96%, or at least about 97%, or at least about 98%, or at least about 99% sequence identity thereto. In another embodiment, an encoded shRNA comprises an RNA sequence selected from the group consisting of SEQ ID NOS: 2592-2639 as set forth in Table 9, or a sequence having at least about 85%, at least about 90%, or at least about 95%, or at least about 95%, or at least about 96%, or at least about 97%, or at least about 98%, or at least about 99% sequence identity thereto. In some embodiments, the shRNA cassette is linked to a strong promoter, such as EF-1α, to ensure that shRNA is transcribed in sufficient quantities to repress translation of the CRISPR protein. In some embodiments, the polynucleotide comprises a first and a second, different shRNA wherein the resulting siRNA are both complementary to the mRNA transcript of the CasX.

TABLE 9
shRNA sequences

| | | RNA | DNA |
|---|---|---|---|
| | | SEQ | SEQ |
| | | ID | ID |
| Name | RNA Sequence* | NO: | NO: |
| shRNA1a | GCCUAGGCAACAGAAGGCUAAAGAAGGUAUAUUGCUGUUGAC | 2592 | 2640 |
| | AGUGAGCGACGCUGAUCAUCAAUUACUUACUGUGAAGCCACA | | |
| | GAUGGGUAAGUAAUUGAUGAUCAGCGCUGCCUACUGCCUCGG | | |
| | ACUUCAAGGGGCUACUUUAGGAGCAAUUAUCUUUUUUU | | |
| shRNA1b | GCCUAGGCAACAGAAGGCUCGAGAAGGUAUAUUGCUGUUGAC | 2593 | 2641 |
| | AGUGAGCGUGUACCUGAUCAUCAAUUACUUUAGUGAAGCCAC | | |
| | AGAUGUAAAGUAAUUGAUGAUCAGGUACAUGCCUACUGCCUC | | |
| | GGACUUCAAGGGGGCUACUUUAGGAGCAAUUAUCUUUUUUU | | |
| shRNA1c | GCCUAGGCAACAGAAUGCUAAAGAAGGUAUAUUGCUGUUGAC | 2594 | 2642 |
| | AGUGAGCGACAAGUAAUUGAUGAUCAGGUACACUGUGAAGCC | | |
| | ACAGAUGGGUGUACCUGAAUCAAUUACUUGCUGCCUACUGCC | | |
| | UCGGACUUCAAGGGGCUACUUUAGGAGCAAUUAUCUUUUUUU | | |
| shRNA1d | GCCUAGGCAACAGAAGGCUCGAGAAGGUAUAUUGCUGUUGAC | 2595 | 2643 |
| | AGUGAGCGUGUACCUGAUCAUCAAUUACUUUAGUGAAGCCAC | | |
| | AGAUGUAAAGUAAUUGAUGAUCAGGUACAUGCCUACUGCCUC | | |
| | GGAAUUCAAGGGGGCUACUUUAGGAGCAAUUAUCUUUUUUU | | |
| shRNA2a | GCCUAGGCAACAGAAGGCUAAAGAAGGUAUAUUGCUGUUGAC | 2596 | 2644 |
| | AGUGAGCGACGCAACUGCGCCUUCAUUUACUGUGAAGCCACA | | |
| | GAUGGGUAAAUGAAGGCGCAGUUGCGCUGCCUACUGCCUCGG | | |
| | ACUUCAAGGGGCUACUUUAGGAGCAAUUAUCUUUUUUU | | |
| shRNA2b | GCCUAGGCAACAGAAGGCUCGAGAAGGUAUAUUGCUGUUGAC | 2597 | 2645 |
| | AGUGAGCGCAGUACAACUGCGCCUUCAUUUUAGUGAAGCCAC | | |
| | AGAUGUAAAAUGAAGGCGCAGUUGUACUGUGCCUACUGCCUC | | |
| | GGACUUCAAGGGGGCUACUUUAGGAGCAAUUAUCUUUUUUU | | |
| shRNA2c | GCCUAGGCAACAGAAUGCUAAAGAAGGUAUAUUGCUGUUGAC | 2598 | 2646 |
| | AGUGAGCGACAAAUGAAGGCGCAGUUGUACUGCUGUGAAGCC | | |
| | ACAGAUGGGCAGUACAACCGCCUUCAUUUGCUGCCUACUGCC | | |
| | UCGGACUUCAAGGGGCUACUUUAGGAGCAAUUAUCUUUUUUU | | |
| shRNA2d | GCCUAGGCAACAGAAGGCUCGAGAAGGUAUAUUGCUGUUGAC | 2599 | 2647 |
| | AGUGAGCGCAGUACAACUGCGCCUUCAUUUUAGUGAAGCCAC | | |
| | AGAUGUAAAAUGAAGGCGCAGUUGUACUGUGCCUACUGCCUC | | |
| | GGAAUUCAAGGGGGCUACUUUAGGAGCAAUUAUCUUUUUUU | | |
| shRNA3a | GCCUAGGCAACAGAAGGCUAAAGAAGGUAUAUUGCUGUUGAC | 2600 | 2648 |
| | AGUGAGCGACGCUGAGCAAGCACAUUAAACUGUGAAGCCACA | | |
| | GAUGGGUUUAAUGUGCUUGCUCAGCGCUGCCUACUGCCUCGG | | |
| | ACUUCAAGGGGCUACUUUAGGAGCAAUUAUCUUUUUUU | | |
| shRNA3b | GCCUAGGCAACAGAAGGCUCGAGAAGGUAUAUUGCUGUUGAC | 2601 | 2649 |
| | AGUGAGCGAAGGCCUGAGCAAGCACAUUAAUAGUGAAGCCAC | | |
| | AGAUGUAUUAAUGUGCUUGCUCAGGCCUUUGCCUACUGCCUC | | |
| | GGACUUCAAGGGGGCUACUUUAGGAGCAAUUAUCUUUUUUU | | |
| shRNA3c | GCCUAGGCAACAGAAUGCUAAAGAAGGUAUAUUGCUGUUGAC | 2602 | 2650 |
| | AGUGAGCGACUUAAUGUGCUUGCUCAGGCCUUCUGUGAAGCC | | |
| | ACAGAUGGGAAGGCCUGAAAGCACAUUAAGCUGCCUACUGCC | | |
| | UCGGACUUCAAGGGGCUACUUUAGGAGCAAUUAUCUUUUUUU | | |
| shRNA3d | GCCUAGGCAACAGAAGGCUCGAGAAGGUAUAUUGCUGUUGAC | 2603 | 2651 |
| | AGUGAGCGAAGGCCUGAGCAAGCACAUUAAUAGUGAAGCCAC | | |
| | AGAUGUAUUAAUGUGCUUGCUCAGGCCUUUGCCUACUGCCUC | | |
| | GGAAUUCAAGGGGGCUACUUUAGGAGCAAUUAUCUUUUUUU | | |
| shRNA4a | GCCUAGGCAACAGAAGGCUAAAGAAGGUAUAUUGCUGUUGAC | 2604 | 2652 |
| | AGUGAGCGACGCCUGAUCAUCAAUUACUACUGUGAAGCCACA | | |
| | GAUGGGUAGUAAUUGAUGAUCAGGCGCUGCCUACUGCCUCGG | | |
| | ACUUCAAGGGGCUACUUUAGGAGCAAUUAUCUUUUUUU | | |
| shRNA4b | GCCUAGGCAACAGAAGGCUCGAGAAGGUAUAUUGCUGUUGAC | 2605 | 2653 |
| | AGUGAGCGCUGUACCUGAUCAUCAAUUACUUAGUGAAGCCAC | | |
| | AGAUGUAAGUAAUUGAUGAUCAGGUACAGUGCCUACUGCCUC | | |
| | GGACUUCAAGGGGGCUACUUUAGGAGCAAUUAUCUUUUUUU | | |
| shRNA4c | GCCUAGGCAACAGAAUGCUAAAGAAGGUAUAUUGCUGUUGAC | 2606 | 2654 |
| | AGUGAGCGACAGUAAUUGAUGAUCAGGUACAGCUGUGAAGCC | | |
| | ACAGAUGGGCUGUACCUGCAUCAAUUACUGCUGCCUACUGCC | | |
| | UCGGACUUCAAGGGGCUACUUUAGGAGCAAUUAUCUUUUUUU | | |
| shRNA4d | GCCUAGGCAACAGAAGGCUCGAGAAGGUAUAUUGCUGUUGAC | 2607 | 2655 |
| | AGUGAGCGCUGUACCUGAUCAUCAAUUACUUAGUGAAGCCAC | | |
| | AGAUGUAAGUAAUUGAUGAUCAGGUACAGUGCCUACUGCCUC | | |
| | GGAAUUCAAGGGGGCUACUUUAGGAGCAAUUAUCUUUUUUU | | |
| shRNA5a | GCCUAGGCAACAGAAGGCUAAAGAAGGUAUAUUGCUGUUGAC | 2608 | 2656 |
| | AGUGAGCGACGGUACCUGAUCAUCAAUUACUGUGAAGCCACA | | |
| | GAUGGGUAAUUGAUGAUCAGGUACCGCUGCCUACUGCCUCGG | | |
| | ACUUCAAGGGGCUACUUUAGGAGCAAUUAUCUUUUUUU | | |
| shRNA5b | GCCUAGGCAACAGAAGGCUCGAGAAGGUAUAUUGCUGUUGAC | 2609 | 2657 |
| | AGUGAGCGAACCUGUACCUGAUCAUCAAUUUAGUGAAGCCAC | | |
| | AGAUGUAAAUUGAUGAUCAGGUACAGGUUUGCCUACUGCCUC | | |
| | GGACUUCAAGGGGGCUACUUUAGGAGCAAUUAUCUUUUUUU | | |
| shRNA5c | GCCUAGGCAACAGAAUGCUAAAGAAGGUAUAUUGCUGUUGAC | 2610 | 2658 |
| | AGUGAGCGACAAUUGAUGAUCAGGUACAGGUUCUGUGAAGCC | | |
| | ACAGAUGGGAACCUGUACGAUCAUCAAUUGCUGCCUACUGCC | | |
| | UCGGACUUCAAGGGGCUACUUUAGGAGCAAUUAUCUUUUUUU | | |
| shRNA5d | GCCUAGGCAACAGAAGGCUCGAGAAGGUAUAUUGCUGUUGAC | 2611 | 2659 |
| | AGUGAGCGAACCUGUACCUGAUCAUCAAUUUAGUGAAGCCAC | | |
| | AGAUGUAAAUUGAUGAUCAGGUACAGGUUUGCCUACUGCCUC | | |
| | GGAAUUCAAGGGGGCUACUUUAGGAGCAAUUAUCUUUUUUU | | |
| shRNA6a | GCCUAGGCAACAGAAGGCUAAAGAAGGUAUAUUGCUGUUGAC | 2612 | 2660 |
| | AGUGAGCGACGUUCAUUUGGCAGAAAGAACUGUGAAGCCACA | | |
| | GAUGGGUUCUUUCUGCCAAAUGAACGCUGCCUACUGCCUCGG | | |
| | ACUUCAAGGGGCUACUUUAGGAGCAAUUAUCUUUUUUU | | |
| shRNA6b | GCCUAGGCAACAGAAGGCUCGAGAAGGUAUAUUGCUGUUGAC | 2613 | 2661 |
| | AGUGAGCGGCGCCUUCAUUUGGCAGAAAGAUAGUGAAGCCAC | | |
| | AGAUGUAUCUUUCUGCCAAAUGAAGGCGCUGCCUACUGCCUC | | |
| | GGACUUCAAGGGGGCUACUUUAGGAGCAAUUAUCUUUUUUU | | |
| shRNA6c | GCCUAGGCAACAGAAUGCUAAAGAAGGUAUAUUGCUGUUGAC | 2614 | 2662 |
| | AGUGAGCGACUCUUUCUGCCAAAUGAAGGCGCCUGUGAAGCC | | |
| | ACAGAUGGGGCGCCUUCAUGGCAGAAAGAGCUGCCUACUGCC | | |
| | UCGGACUUCAAGGGGCUACUUUAGGAGCAAUUAUCUUUUUUU | | |
| shRNA6d | GCCUAGGCAACAGAAGGCUCGAGAAGGUAUAUUGCUGUUGAC | 2615 | 2663 |
| | AGUGAGCGGCGCCUUCAUUUGGCAGAAAGAUAGUGAAGCCAC | | |
| | AGAUGUAUCUUUCUGCCAAAUGAAGGCGCUGCCUACUGCCUC | | |
| | GGAAUUCAAGGGGGCUACUUUAGGAGCAAUUAUCUUUUUUU | | |
| shRNA7a | GCCUAGGCAACAGAAGGCUAAAGAAGGUAUAUUGCUGUUGAC | 2616 | 2664 |
| | AGUGAGCGACGCAUCAAUUACUUCAAAGACUGUGAAGCCACA | | |
| | GAUGGGUCUUUGAAGUAAUUGAUGCGCUGCCUACUGCCUCGG | | |
| | ACUUCAAGGGGCUACUUUAGGAGCAAUUAUCUUUUUUU | | |
| shRNA7b | GCCUAGGCAACAGAAGGCUCGAGAAGGUAUAUUGCUGUUGAC | 2617 | 2665 |
| | AGUGAGCGCUGAUCAUCAAUUACUUCAAAGUAGUGAAGCCAC | | |
| | AGAUGUACUUUGAAGUAAUUGAUGAUCAGUGCCUACUGCCUC | | |
| | GGACUUCAAGGGGGCUACUUUAGGAGCAAUUAUCUUUUUUU | | |
| shRNA7c | GCCUAGGCAACAGAAUGCUAAAGAAGGUAUAUUGCUGUUGAC | 2618 | 2666 |
| | AGUGAGCGACCUUUGAAGUAAUUGAUGAUCAGCUGUGAAGCC | | |
| | ACAGAUGGGCUGAUCAUCUUACUUCAAAGGCUGCCUACUGCC | | |
| | UCGGACUUCAAGGGGCUACUUUAGGAGCAAUUAUCUUUUUUU | | |
| shRNA7d | GCCUAGGCAACAGAAGGCUCGAGAAGGUAUAUUGCUGUUGAC | 2619 | 2667 |
| | AGUGAGCGCUGAUCAUCAAUUACUUCAAAGUAGUGAAGCCAC | | |
| | AGAUGUACUUUGAAGUAAUUGAUGAUCAGUGCCUACUGCCUC | | |
| | GGAAUUCAAGGGGGCUACUUUAGGAGCAAUUAUCUUUUUUU | | |
| shRNA8a | GCCUAGGCAACAGAAGGCUAAAGAAGGUAUAUUGCUGUUGAC | 2620 | 2668 |
| | AGUGAGCGACGUACCUGAUCAUCAAUUAACUGUGAAGCCACA | | |
| | GAUGGGUUAAUUGAUGAUCAGGUACGCUGCCUACUGCCUCGG | | |
| | ACUUCAAGGGGCUACUUUAGGAGCAAUUAUCUUUUUUU | | |
| shRNA8b | GCCUAGGCAACAGAAGGCUCGAGAAGGUAUAUUGCUGUUGAC | 2621 | 2669 |
| | AGUGAGCGUCCUGUACCUGAUCAUCAAUUAUAGUGAAGCCAC | | |
| | AGAUGUAUAAUUGAUGAUCAGGUACAGGUUGCCUACUGCCUC | | |
| | GGACUUCAAGGGGGCUACUUUAGGAGCAAUUAUCUUUUUUU | | |
| shRNA8c | GCCUAGGCAACAGAAUGCUAAAGAAGGUAUAUUGCUGUUGAC | 2622 | 2670 |
| | AGUGAGCGACUAAUUGAUGAUCAGGUACAGGUCUGUGAAGCC | | |
| | ACAGAUGGGUCCUGUACCAUCAUCAAUUAGCUGCCUACUGCC | | |
| | UCGGACUUCAAGGGGCUACUUUAGGAGCAAUUAUCUUUUUUU | | |
| shRNA8d | GCCUAGGCAACAGAAGGCUCGAGAAGGUAUAUUGCUGUUGAC | 2623 | 2671 |
| | AGUGAGCGUCCUGUACCUGAUCAUCAAUUAUAGUGAAGCCAC | | |
| | AGAUGUAUAAUUGAUGAUCAGGUACAGGUUGCCUACUGCCUC | | |
| | GGAAUUCAAGGGGGCUACUUUAGGAGCAAUUAUCUUUUUUU | | |
| shRNA9a | GCCUAGGCAACAGAAGGCUAAAGAAGGUAUAUUGCUGUUGAC | 2624 | 2672 |
| | AGUGAGCGACGCUGAUCUUCGAGAAUCUACUGUGAAGCCACA | | |
| | GAUGGGUAGAUUCUCGAAGAUCAGCGCUGCCUACUGCCUCGG | | |
| | ACUUCAAGGGGCUACUUUAGGAGCAAUUAUCUUUUUUU | | |
| shRNA9b | GCCUAGGCAACAGAAGGCUCGAGAAGGUAUAUUGCUGUUGAC | 2625 | 2673 |
| | AGUGAGCGCCAUGCUGAUCUUCGAGAAUCUUAGUGAAGCCAC | | |
| | AGAUGUAAGAUUCUCGAAGAUCAGCAUGGUGCCUACUGCCUC | | |
| | GGACUUCAAGGGGGCUACUUUAGGAGCAAUUAUCUUUUUUU | | |
| shRNA9c | GCCUAGGCAACAGAAUGCUAAAGAAGGUAUAUUGCUGUUGAC | 2626 | 2674 |
| | AGUGAGCGACAGAUUCUCGAAGAUCAGCAUGGCUGUGAAGCC | | |
| | ACAGAUGGGCCAUGCUUCUUCGAGAAUCUGCUGCCUACUGCC | | |
| | UCGGACUUCAAGGGGCUACUUUAGGAGCAAUUAUCUUUUUUU | | |
| shRNA9d | GCCUAGGCAACAGAAGGCUCGAGAAGGUAUAUUGCUGUUGAC | 2627 | 2675 |
| | AGUGAGCGCCAUGCUGAUCUUCGAGAAUCUUAGUGAAGCCAC | | |
| | AGAUGUAAGAUUCUCGAAGAUCAGCAUGGUGCCUACUGCCUC | | |
| | GGAAUUCAAGGGGGCUACUUUAGGAGCAAUUAUCUUUUUUU | | |
| shRNA10a | GCCUAGGCAACAGAAGGCUAAAGAAGGUAUAUUGCUGUUGAC | 2628 | 2676 |
| | AGUGAGCGACGGAAGAAGGGCAAGAAGUACUGUGAAGCCACA | | |
| | GAUGGGUACUUCUUGCCCUUCUUCCGCUGCCUACUGCCUCGG | | |
| | ACUUCAAGGGGCUACUUUAGGAGCAAUUAUCUUUUUUU | | |
| shRNA10b | GCCUAGGCAACAGAAGGCUCGAGAAGGUAUAUUGCUGUUGAC | 2629 | 2677 |
| | AGUGAGCGGACCGGAAGAAGGGCAAGAAGUUAGUGAAGCCAC | | |
| | AGAUGUAACUUCUUGCCCUUCUUCCGGUCUGCCUACUGCCUC | | |
| | GGACUUCAAGGGGGCUACUUUAGGAGCAAUUAUCUUUUUUU | | |
| shRNA10c | GCCUAGGCAACAGAAUGCUAAAGAAGGUAUAUUGCUGUUGAC | 2630 | 2678 |
| | AGUGAGCGACACUUCUUGCCCUUCUUCCGGUCCUGUGAAGCC | | |
| | ACAGAUGGGGACCGGAAGGGGCAAGAAGUGCUGCCUACUGCC | | |
| | UCGGACUUCAAGGGGCUACUUUAGGAGCAAUUAUCUUUUUUU | | |
| shRNA10d | GCCUAGGCAACAGAAGGCUCGAGAAGGUAUAUUGCUGUUGAC | 2631 | 2679 |
| | AGUGAGCGGACCGGAAGAAGGGCAAGAAGUUAGUGAAGCCAC | | |
| | AGAUGUAACUUCUUGCCCUUCUUCCGGUCUGCCUACUGCCUC | | |
| | GGAAUUCAAGGGGGCUACUUUAGGAGCAAUUAUCUUUUUUU | | |
| shRNA11a | GCCUAGGCAACAGAAGGCUAAAGAAGGUAUAUUGCUGUUGAC | 2632 | 2680 |
| | AGUGAGCGACGGAUCAACGAGAAGAAAGACUGUGAAGCCACA | | |
| | GAUGGGUCUUUCUUCUCGUUGAUCCGCUGCCUACUGCCUCGG | | |
| | ACUUCAAGGGGCUACUUUAGGAGCAAUUAUCUUUUUUU | | |
| shRNA11b | GCCUAGGCAACAGAAGGCUCGAGAAGGUAUAUUGCUGUUGAC | 2633 | 2681 |
| | AGUGAGCGAAGCUGAUCAACGAGAAGAAAGUAGUGAAGCCAC | | |
| | AGAUGUACUUUCUUCUCGUUGAUCAGCUUUGCCUACUGCCUC | | |
| | GGACUUCAAGGGGGCUACUUUAGGAGCAAUUAUCUUUUUUU | | |
| shRNA11c | GCCUAGGCAACAGAAUGCUAAAGAAGGUAUAUUGCUGUUGAC | 2634 | 2682 |
| | AGUGAGCGACCUUUCUUCUCGUUGAUCAGCUUCUGUGAAGCC | | |
| | ACAGAUGGGAAGCUGAUCCGAGAAGAAAGGCUGCCUACUGCC | | |
| | UCGGACUUCAAGGGGCUACUUUAGGAGCAAUUAUCUUUUUUU | | |
| shRNA11d | GCCUAGGCAACAGAAGGCUCGAGAAGGUAUAUUGCUGUUGAC | 2635 | 2683 |
| | AGUGAGCGAAGCUGAUCAACGAGAAGAAAGUAGUGAAGCCAC | | |
| | AGAUGUACUUUCUUCUCGUUGAUCAGCUUUGCCUACUGCCUC | | |
| | GGAAUUCAAGGGGGCUACUUUAGGAGCAAUUAUCUUUUUUU | | |
| shRNA12a | GCCUAGGCAACAGAAGGCUAAAGAAGGUAUAUUGCUGUUGAC | 2636 | 2684 |
| | AGUGAGCGACGGAAGAGUUCCAGAAAGAACUGUGAAGCCACA | | |
| | GAUGGGUUCUUUCUGGAACUCUUCCGCUGCCUACUGCCUCGG | | |
| | ACUUCAAGGGGCUACUUUAGGAGCAAUUAUCUUUUUUU | | |
| shRNA12b | GCCUAGGCAACAGAAGGCUCGAGAAGGUAUAUUGCUGUUGAC | 2637 | 2685 |
| | AGUGAGCGACUGGGAAGAGUUCCAGAAAGAUAGUGAAGCCAC | | |
| | AGAUGUAUCUUUCUGGAACUCUUCCCAGUUGCCUACUGCCUC | | |
| | GGACUUCAAGGGGGCUACUUUAGGAGCAAUUAUCUUUUUUU | | |
| shRNA12c | GCCUAGGCAACAGAAUGCUAAAGAAGGUAUAUUGCUGUUGAC | 2638 | 2686 |
| | AGUGAGCGACUCUUUCUGGAACUCUUCCCAGUCUGUGAAGCC | | |
| | ACAGAUGGGACUGGGAAGUUCCAGAAAGAGCUGCCUACUGCC | | |
| | UCGGACUUCAAGGGGCUACUUUAGGAGCAAUUAUCUUUUUUU | | |
| shRNA12d | GCCUAGGCAACAGAAGGCUCGAGAAGGUAUAUUGCUGUUGAC | 2639 | 2687 |
| | AGUGAGCGACUGGGAAGAGUUCCAGAAAGAUAGUGAAGCCAC | | |
| | AGAUGUAUCUUUCUGGAACUCUUCCCAGUUGCCUACUGCCUC | | |
| | GGAAUUCAAGGGGGCUACUUUAGGAGCAAUUAUCUUUUUUU | | |

[0387] In some embodiments, the polynucleotides of the shRNA-siAAV system are transfected into a eukaryotic packaging cell, together with a plasmid encoding the AAV capsid protein, wherein the packaging cell is incubated under conditions leading to the expression of the shRNA and the siAAV. In some embodiments, the eukaryotic packaging cell is selected from BHK cells, HEK293 cells, HEK293T cells, NS0 cells, SP2/0 cells, YO myeloma cells, P3X63 mouse myeloma cells, PER cells, PER.C6 cells, hybridoma cells, NIH3T3 cells, COS, HeLa, CHO, or other eukaryotic cells known in the art suitable for the production of recombinant siAAV. The resulting siAAV particles are then recovered by conventional means including, without limitation, affinity chromatography, gradient centrifugation, and ion exchange chromatography.

[0388] In another aspect, the present disclosure relates to methods of reducing premature cleavage of an siAAV transgene encoding a Class 2 Type V CRISPR nuclease protein and gRNA in a transfected packaging cell. In some embodiments, the method comprises introducing a sequence encoding a small hairpin RNA (shRNA) into the packaging cell transfected with the siAAV transgene, wherein the shRNA is capable of being expressed and processed into an siRNA sequence, as described above, and wherein the siRNA sequence is complementary to an mRNA of the Class 2 Type V CRISPR nuclease transcribed by the packaging cell. In some embodiments, the method comprises introducing a sequence encoding a small hairpin RNA (shRNA) into the packaging cell transfected with the siAAV transgene, wherein the shRNA is capable of being expressed and processed into an siRNA sequence, as described above, and wherein the siRNA sequence is complementary to an mRNA of the Class 2 Type V CRISPR gRNA transcribed by the packaging cell. In some embodiments, the nucleic acid sequence encoding the shRNA is operably linked to a promoter. In some embodiments, the nucleic acid sequence encoding the shRNA and linked promoter is linked exterior to the AAV transgene in a vector (e.g., is inserted into a bacterial plasmid backbone comprising the AAV transgene but is not within the transgene sequence) that is transfected into the packaging cell, along with the pRC and pHelper vectors. In other embodiments, the nucleic acid sequence encoding the shRNA and linked promoter is introduced into the packaging cell using a separate vector from the AAV transgene vector, while the pRC and pHelper vectors are also transfected into the packaging cell. In other embodiments, the nucleic acid sequence encoding the shRNA is integrated into the packaging cell genome, and the packaging cell is transfected with the AAV transgene and the pRC and pHelper vectors. In still another embodiment, the nucleic acid sequences encoding the shRNA, Rep, Cap, E2, and VA are integrated into the packaging cell genome and the AAV transgene is transfected into the packaging cell. In some embodiments, the packaging cell is selected from the group consisting of BHK, HEK293, HEK293T, NS0, SP2/0, YO myeloma cells, A549, P3X63 mouse myeloma cells, PER, PER.C6, NIH3T3, COS, HeLa, and CHO.

[0389] In some embodiments of the disclosure, upon transcription of the shRNA and the Class 2 Type V CRISPR nuclease into mRNA and processing of the shRNA into siRNA by the packaging cell, the siRNA hybridizes with the mRNA of the Class 2 Type V CRISPR nuclease and is degraded by the packaging cell. In some embodiments of the method, expression of the Class 2 Type V CRISPR nuclease protein in the packaging cell is repressed by at least 40%, at least 50%, at least 60%, at least 70%, at least 80%, or at least 90% compared to a transfected packaging cell not comprising the shRNA sequence, when assayed in a timed in vitro assay under comparable conditions. In some embodiments of the method, the Class 2 Type V CRISPR nuclease protein of the siAAV transgene is a CasX, wherein the encoded CasX comprises a sequence selected from the group consisting of SEQ ID NOS: 1-3, and SEQ ID NOS: 49-321 and 2356-2488, or as set forth in Table 5, or a sequence having at least 85%, at least 90%, at least 95%, at least 95%, at least 96%, at least 97%, at least 98%, or at least 99% identity thereto. In other embodiments of the method, the Class 2 Type V CRISPR nuclease protein of the siAAV transgene is a CasX, wherein the encoded CasX comprises a sequence selected from the group consisting of SEQ ID NOS: 1-3, and SEQ ID NOS: 49-321 and 2356-2488, or as set forth in Table 5. In a particular embodiment of the method, a CasX variant protein of the siAAV transgene comprises the sequence of SEQ ID NO: 138, or a sequence having at least about 70%, at least about 80%, at least about 80%, at least about 85%, at least about 90%, or at least about 95%, or at least about 95%, or at least about 96%, or at least about 97%, or at least about 98%, or at least about 99% sequence identity thereto, wherein the mRNA of the transcribed CasX is capable of being bound by the siRNA. In some embodiments, the production of functional CasX protein in a cellular expression system comprising the shRNA cassette is repressed by at least 40%, at least 50%, at least 60%, at least 70%, at least 80%, or at least 90% compared to a system not comprising the shRNA cassette, when assayed in a timed in vitro cellular assay under comparable conditions. Exemplary assay systems are described herein, in the Examples.

[0390] In some embodiments of the method, the shRNA used to transfect the packaging cell is encoded by a sequence comprising a sequence selected from the group consisting of SEQ ID NOS: 2640-2687 of Table 9, or a sequence having at least about 85%, at least about 90%, or at least about 95%, or at least about 95%, or at least about 96%, or at least about 97%, or at least about 98%, or at least about 99% sequence identity thereto. In some embodiments, the shRNA comprises a sequence selected from the group consisting of SEQ ID NOS: 2592-2639, or a sequence having at least about 85%, at least about 90%, or at least about 95%, or at least about 95%, or at least about 96%, or at least about 97%, or at least about 98%, or at least about 99% sequence identity thereto, wherein the resulting siRNA (processed from the shRNA by the packaging cell) is capable of binding the mRNA of the transcribed Class 2 Type V, CasX of the siAAV. In other embodiments of the method, the shRNA is encoded by a sequence comprising a sequence selected from the group consisting of SEQ ID NOS: 2640-2687 of Table 9. In some embodiments, the shRNA comprises a sequence selected from the group consisting of SEQ ID NOS: 2592-2639, wherein the resulting siRNA (processed from the shRNA by the packaging cell) is capable of binding the mRNA of the transcribed CasX of the siAAV. In other embodiments of the method, a first and a second, different shRNA sequence is transfected into the packaging cell.

[0391] In other embodiments of the method, upon transcription of the shRNA and the Class 2 Type V CRISPR gRNA, and the processing of the shRNA into siRNA by the packaging cell, the siRNA hybridizes with the gRNA and is degraded by the packaging cell. In some embodiments of the method, expression of the Class 2 Type V CRISPR gRNA in the packaging cell is repressed by at least 40%, at least 50%, at least 60%, at least 70%, at least 80%, or at least 90% compared to a transfected packaging cell not comprising the shRNA sequence, when assayed in a timed in vitro assay under comparable conditions.

XI. Controlled Production of siAAV Utilizing RNAi or Anti-Sense RNA

[0392] In another aspect, the present disclosure relates to methods of reducing premature cleavage of siAAV transgenes in transfected packaging cells using polynucleotide constructs using interfering RNA (RNAi) or anti-sense RNA (asRNA). In some embodiments, the disclosure provides systems of polynucleotides comprising one or more sequences encoding RNAi or asRNA wherein the sequences are complementary to either the gRNA transcribed by the packaging cell that target the self-inactivating segments utilized in the siAAV transgene or are complementary to the mRNA encoding the Class 2 CRISPR nuclease protein transcribed by the packaging cell. In some embodiments of the method, the RNAi or asRNA sequences are linked to a promoter wherein the sequence encoding the RNAi or asRNA and linked promoter is linked to the 5′ end of the siAAV transgene (i.e., 5′ to the packaging component) transfected into the packaging cell. In other embodiments of the method, the RNAi or asRNA sequences are linked to a promoter wherein the sequence encoding the RNAi or asRNA and linked promoter is transfected into the packaging cell using a separate vector than that of the siAAV. In some embodiments, the packaging cell selected from the group consisting of BHK, HEK293, HEK293T, NS0, SP2/0, YO myeloma cells, A549, P3X63 mouse myeloma cells, PER, PER.C6, NIH3T3, COS, HeLa, and CHO.

[0393] In some embodiments of the method, upon transcription of the gRNA and RNAi or asRNA by the packaging cell, the RNAi or asRNA hybridizes with the gRNA, interfering with the ability of the gRNA to complex with the expressed CRISPR nuclease to form an RNP. In other embodiments of the method, upon transcription of the mRNA of the CRISPR nuclease and the RNAi or asRNA by the packaging cell, the RNAi or asRNA hybridizes with the mRNA of the CRISPR nuclease, repressing expression of the CRISPR nuclease protein in the packaging cell. It will be understood that as the amount of CRISPR nuclease protein is reduced in the packaging cell, the ability of the gRNA to complex with the CRISPR nuclease to form an RNP is similarly reduced. As will be appreciated, as it is the RNP that is required to effect the cleavage of the self-inactivating segments, any repression of the formation of the RNP reduces the amount of cleavage of the transgene and increases the ability of the packaging cell to create AAV with an intact transgene. In some embodiments of the method, the formation of the RNP in the packaging cell is repressed by at least 40%, at least 50%, at least 60%, at least 70%, at least 80%, or at least 90% compared to a transfected packaging cell not comprising the RNAi or asRNA sequence, when assayed in a timed in vitro assay under comparable conditions. In other embodiments of the method, the cleavage of the siAAV transgene in the packaging cell is repressed by at least 40%, at least 50%, at least 60%, at least 70%, at least 80%, or at least 90% compared to a transfected packaging cell not comprising the RNAi or asRNA sequence, when assayed in a timed in vitro assay under comparable conditions.

[0394] In some embodiments of the method, the encoded Class 2 CRISPR nuclease protein of the transgene is a CasX wherein the encoded sequence is selected from the group consisting of SEQ ID NOS: 1-3, and the sequences of SEQ ID NOS: 49-321 and 2356-2488, or as set forth in Table 5, or a sequence having at least 85%, at least 90%, at least 95%, at least 95%, at least 96%, at least 97%, at least 98%, or at least 99% identity thereto. In some embodiments of the method, the encoded Class 2 CRISPR nuclease protein of the transgene is a CasX wherein the encoded sequence is selected from the group consisting of SEQ ID NOS: 1-3, and the sequences of SEQ ID NOS: 49-321 and 2356-2488, or as set forth in Table 5. In some embodiments of the method, the encoded gRNA has a scaffold comprising a sequence selected from the group of sequences consisting of the sequences of SEQ ID NOS: 2101-2331 and 3992-3995 as set forth in Table 2, or a sequence having at least at least about 50%, at least about 60%, at least about 70%, at least about 80%, at least about 80%, at least about 85%, at least about 90%, or at least about 95%, or at least about 95%, or at least about 96%, or at least about 97%, or at least about 98%, or at least about 99% sequence identity thereto. In some embodiments of the method, the encoded gRNA has a scaffold comprising a sequence selected from the group of sequences consisting of the sequences of SEQ ID NOS: 2101-2331 and 3992-3995 as set forth in Table 2. In some embodiments of the method, the encoded Class 2 CRISPR nuclease protein of the transgene is a CasX of SEQ ID NO: 138 and the encoded gRNA has a scaffold comprising a sequence of SEQ ID NO: 2296.

XII. Controlled Production of siAAV Utilizing Non-Targeting gRNA (“Decoy gRNA”)

[0395] In another aspect, the present disclosure relates to methods of reducing premature cleavage of siAAV transgenes in transfected packaging cells using polynucleotide constructs comprising non-targeting gRNA. In some embodiments, the disclosure provides siAAV systems of polynucleotides comprising, in addition to the siAAV transgene of any of the embodiments described herein that are used to transfect the packaging cell, a sequence encoding a gRNA wherein the gRNA either has a non-targeting targeting sequence (meaning the targeting sequence is not able to hybridize with a target nucleic acid) or the scaffold does not comprise a targeting sequence; i.e., the gRNA is only the scaffold (and in either case would be considered non-targeting). Such gRNA are referred to herein as “decoy gRNA” in that upon expression in the transfected packaging cell, they are able to compete with any expressed targeting gRNA for complexing with expressed CRISPR nuclease protein. When such decoy gRNA form an RNP with the expressed CRISPR nuclease protein, the RNP is unable to cleave the self-inactivating sequences of the siAAV transgene, thereby increasing the number of intact siAAV that can be produced by the host cell. In some embodiments of the method, the non-targeting gRNA sequence is linked to a stronger promoter compared to the promoter linked to the gRNA of the siAAV transgene; embodiments of which are described herein, supra. In other embodiments, the non-targeting gRNA sequence is linked to a promoter that is identical to the promoter linked to the gRNA of the siAAV transgene. In some embodiments, the sequence encoding the non-targeting gRNA and linked promoter is linked to the 5′ end of the siAAV transgene (i.e., 5′ to the packaging element) transfected into the packaging cell. In other embodiments of the method, the non-targeting gRNA sequence and linked promoter is transfected into the packaging cell using a separate vector than that of the siAAV. Representative schematics of such configurations are shown in FIG. 85. In some embodiments, the packaging cell selected from the group consisting of BHK, HEK293, HEK293T, NS0, SP2/0, YO myeloma cells, A549, P3X63 mouse myeloma cells, PER, PER.C6, NIH3T3, COS, HeLa, and CHO.

[0396] It will be understood that by use of a stronger promoter with the non-targeting gRNA, compared to the targeting gRNA, the former would be expressed to a greater extent and would complex a larger percentage of the CRISPR nuclease, thereby reducing the amount of premature cleavage of the transgene and increasing the ability of the packaging cell to create siAAV with an intact transgene. In some embodiments, the stronger promoter linked to the non-targeting gRNA is U6, while the promoter linked to the targeting gRNA is selected from the group consisting of H1, 7SK, and mini U6. In some embodiments of the method, the cleavage of the siAAV transgene in the packaging cell is repressed by at least 40%, at least 50%, at least 60%, at least 70%, at least 80%, or at least 90% compared to a transfected packaging cell not comprising the non-targeting gRNA sequence, when assayed in a timed in vitro assay under comparable conditions. In some embodiments of the method, the titer of the siAAV produced by the packaging cell comprising an encoding a decoy RNA is at least about 2-fold, at least about 3-fold, at least about 4-fold, at least about 5-fold, at least about 6-fold, at least about 7-fold, at least about 8-fold, at least about 9-fold, at least about 10-fold higher compared to the titer produced using a comparable siAAV construct not comprising the decoy gRNA.

[0397] In some embodiments of the method, the encoded Class 2 Type V CRISPR nuclease protein of the transgene is a CasX wherein the encoded sequence is selected from the group consisting of SEQ ID NOS: 1-3 and the sequences of SEQ ID NOS: 49-321 and 2356-2488, or as set forth in Table 5, or a sequence having at least 85%, at least 90%, at least 95%, at least 95%, at least 96%, at least 97%, at least 98%, or at least 99% identity thereto. In some embodiments of the method, the encoded Class 2 Type V CRISPR nuclease protein of the transgene is a CasX wherein the encoded sequence is selected from the group consisting of SEQ ID NOS: 1-3 and the sequences of SEQ ID NOS: 49-321 and 2356-2488, or as set forth in Table 5. In some embodiments of the method, the encoded gRNA of the transgene and the non-targeting decoy gRNA each has a scaffold comprising a sequence selected from the group of sequences consisting of the sequences of SEQ ID NOS: 2101-2331 and 3992-3995 as set forth in Table 2, or a sequence having at least at least about 50%, at least about 60%, at least about 70%, at least about 80%, at least about 80%, at least about 85%, at least about 90%, or at least about 95%, or at least about 95%, or at least about 96%, or at least about 97%, or at least about 98%, or at least about 99% sequence identity thereto. In some embodiments of the method, the encoded gRNA of the transgene and the non-targeting decoy gRNA each has a scaffold comprising a sequence selected from the group of sequences consisting of the sequences of SEQ ID NOS: 2101-2331 and 3992-3995 as set forth in Table 2. In some embodiments of the method, the encoded decoy gRNAs has a stronger binding affinity to the CRISPR nuclease than the targeting gRNA. In some embodiments, the decoy gRNA comprises a scaffold of SEQ ID NO: 2291 or 2296, while the targeting gRNA comprises a scaffold of SEQ ID NO: 2238.

### XIII. Kits and Articles of Manufacture

[0398] In other embodiments, provided herein are kits comprising an SIRV or siAAV vector of any of the embodiments of the disclosure, and a suitable container (for example a tube, vial or plate).

[0399] In some embodiments, the kit further comprises a buffer, a nuclease inhibitor, a protease inhibitor, a liposome, a therapeutic agent, a label, a label visualization reagent, or any combination of the foregoing. In some embodiments, the kit further comprises a pharmaceutically acceptable carrier, diluent or excipient.

[0400] In some embodiments, the kit comprises appropriate control compositions for gene modifying applications, and instructions for use.

[0401] The present description sets forth numerous exemplary configurations, methods, parameters, and the like. It should be recognized, however, that such description is not intended as a limitation on the scope of the present disclosure, but is instead provided as a description of exemplary embodiments.

### Enumerated Embodiments

[0402] The disclosure can be understood with respect to the following illustrated, enumerated embodiments:

### Set I

[0403] Embodiment I-1. A self-inactivating recombinant vector (SIRV) comprising a polynucleotide comprising one or more components selected from:
[0404] a) one or more packaging components;
[0405] b) a sequence encoding a Class 2 CRISPR protein having a single RNA-guided RuvC domain;
[0406] c) a first promoter operably linked to the sequence encoding the Class 2 CRISPR protein;
[0407] d) a sequence encoding a first guide RNA (gRNA) comprising a scaffold sequence and a linked targeting sequence that is complementary to and capable of hybridizing with: 1) a target nucleic acid of a cell to be modified; and 2) one or more self-inactivating segments incorporated in the polynucleotide;
[0408] e) a second promoter sequence operably linked to the sequence encoding the first gRNA; and
[0409] f) one or more self-inactivating segments of the polynucleotide comprising a protospacer adjacent motif (PAM) sequence and a polynucleotide sequence capable of being bound and cleaved by a ribonuclear protein complex (RNP) comprising the Class 2 CRISPR protein and the first gRNA.

[0410] Embodiment I-2. The SIRV of embodiment I-1, wherein the SIRV comprises components (a)-(f).

[0411] Embodiment I-3. The SIRV of embodiment I-1 or I-2, wherein the one or more self-inactivating segments of the polynucleotide are located:
[0412] a) 5′ or 3′ adjacent to or within the sequence encoding the Class 2 CRISPR protein;
[0413] b) 5′ or 3′ adjacent to or within a Kozak sequence located between the first promoter and the sequence encoding the Class 2 CRISPR protein;
[0414] c) 5′ or 3′ adjacent to or within to the first promoter sequence;
[0415] d) 5′ or 3′ adjacent to or within the second promoter sequence;
[0416] e) downstream of the transcriptional start site for the sequence encoding the Class 2 CRISPR protein;
[0417] f) within one or more inserted introns in the polynucleotide encoding the Class 2 CRISPR protein;
[0418] g) at the 3′ end of the polynucleotide encoding the Class 2 CRISPR protein, between a stop codon and poly(A) termination site for the Class2 CRISPR protein; or
[0419] h) any combination of (a)-(g).

[0420] Embodiment I-4. The SIRV of embodiments I-1 to I-3, wherein the self-inactivating segment comprises a sequence corresponding to any 15-21 nucleotide portion of the target nucleic acid sequence that is 3′ adjacent to a PAM sequence recognized by an RNP of the Class 2 CRISPR protein and the first gRNA.

[0421] Embodiment I-5. The SIRV of any one of embodiments I-1 to I-4, wherein the PAM sequence of the one or more self-inactivating segments:
[0422] a) is identical to the PAM sequence of the target nucleic acid of the cell to be modified; and
[0423] b) promotes less efficient cleavage or rate of cleavage of the self-inactivating segment by the RNP compared to the PAM sequence 5′ and adjacent to the target nucleic acid of the cell to be modified.

[0424] Embodiment I-6. The SIRV of embodiment I-5, wherein the PAM sequence of the target nucleic acid is NTN.

[0425] Embodiment I-7. The SIRV of any one of embodiments I-1 to I-6, wherein the PAM sequence of the one or more self-inactivating segments:
[0426] a) is different by at least one nucleotide from the PAM sequence of the target nucleic acid of the cell to be modified; and
[0427] b) promotes less efficient cleavage or rate of cleavage of the self-inactivating segment by the RNP compared to the target nucleic acid of the cell to be modified.

[0428] Embodiment I-8. The SIRV of embodiment I-7, wherein:
[0429] a) if the PAM sequence of the target nucleic acid of the cell to be modified is TTC and the PAM preference of the Class 2 CRISPR protein is TTC, then the PAM sequence of the one or more self-inactivating segments is selected from the group consisting of ATC, CTC, TTT, GTT, and GTC;
[0430] b) if the PAM sequence of the target nucleic acid of the cell to be modified is ATC and the PAM preference of the Class 2 CRISPR protein is TTC, then the PAM sequence of the one or more self-inactivating segments is selected from the group consisting of CTC, TTT, GTT, and GTC; or
[0431] c) if the PAM sequence of the target nucleic acid of the cell to be modified is CTC and the PAM preference of the Class 2 CRISPR protein is TTC, then the PAM sequence of the one or more self-inactivating segments is TTT, GTT, ATC, or GTC.

[0432] Embodiment I-9. The SIRV of embodiment I-7, wherein:
[0433] a) if the PAM sequence of the target nucleic acid of the cell to be modified is ATC and the PAM preference of the Class 2 CRISPR protein is ATC, then the PAM sequence of the one or more self-inactivating segments is selected from the group consisting of TTC, CTC, TTT, GTT, and GTC;
[0434] b) if the PAM sequence of the target nucleic acid of the cell to be modified is CTC and the PAM preference of the Class 2 CRISPR protein is ATC, then the PAM sequence of the one or more self-inactivating segments is selected from the group consisting of TTC, TTT, GTT, and GTC; or
[0435] c) if the PAM sequence of the target nucleic acid of the cell to be modified is GTC and the PAM preference of the Class 2 CRISPR protein is ATC, then the PAM sequence of the one or more self-inactivating segments is TTC, TTT, CTC, or GTT.

[0436] Embodiment I-10. The SIRV of embodiment I-7, wherein:
[0437] a) if the PAM sequence of the target nucleic acid of the cell to be modified is GTC and the PAM preference of the Class 2 CRISPR protein is GTC, then the PAM sequence of the one or more self-inactivating segments is selected from the group consisting of ATC, CTC, TTT, GTT, and TTC.
[0438] b) if the PAM sequence of the target nucleic acid of the cell to be modified is GTC and the PAM preference of the Class 2 CRISPR protein is ATC, then the PAM sequence of the one or more self-inactivating segments is selected from the group consisting of TTC, TTT, GTT, and CTC; or
[0439] c) if the PAM sequence of the target nucleic acid of the cell to be modified is CTC and the PAM preference of the Class 2 CRISPR protein is GTC, then the PAM sequence of the one or more self-inactivating segments is TTC, TTT, ATC, or GTT.

[0440] Embodiment I-11. The SIRV of embodiment I-7, wherein:
[0441] a) if the PAM sequence of the target nucleic acid of the cell to be modified is CTC and the PAM preference of the Class 2 CRISPR protein is CTC, then the PAM sequence of the one or more self-inactivating segments is selected from the group consisting of ATC, GTC, TTT, GTT, and TTC.
[0442] b) if the PAM sequence of the target nucleic acid of the cell to be modified is ATC and the PAM preference of the Class 2 CRISPR protein is CTC, then the PAM sequence of the one or more self-inactivating segments is selected from the group consisting of GTC, TTT, GTT, and TTC; or
[0443] c) if the PAM sequence of the target nucleic acid of the cell to be modified is GTC and the PAM preference of the Class 2 CRISPR protein is CTC, then the PAM sequence of the one or more self-inactivating segments is TTC, TTT, ATC, or GTT.

[0444] Embodiment I-12. The SIRV of any one of embodiments I-1 to I-11, wherein the one or more self-inactivating segments each have between about 1 to about 5 bases that are not individually complementary to corresponding positions in the targeting sequence of the first gRNA.

[0445] Embodiment I-13. The SIRV of embodiment I-12, wherein the one or more self-inactivating segments each have between 1 to 3 bases that are not complementary to corresponding positions in the targeting sequence of the first gRNA.

[0446] Embodiment I-14. The SIRV of embodiment I-12 or I-13, wherein the base differences of the one or more self-inactivating segments correspond to positions that are 3′ to the fourth nucleotide of the targeting sequence of the first gRNA when the two sequences are aligned.

[0447] Embodiment I-15. The SIRV of any one of embodiments I-1 to I-14, wherein the percent cleavage by the RNP of the self-inactivating segments of the polynucleotide in a cell transfected or transduced with the SIRV is at least about 10%, at least about 20%, at least about 30%, at least about 40%, at least about 50%, at least about 60%, at least about 70%, at least about 80%, or at least about 90% less than the cleavage of the target nucleic acid in the cell in a timed in vitro cell-based assay, when assayed under comparable conditions.

[0448] Embodiment I-16. The SIRV of any one of embodiments I-1 to I-15, wherein the time to achieve 90% cleavage by the RNP of the self-inactivating segments of the polynucleotide in a cell transfected or transduced with the SIRV is delayed, relative to the time to achieve 90% editing of the target nucleic acid in the cell, by at least about 1 day, at least about 2 days, at least about 3 days, at least about 4 days, at least about 5 days, at least about 6 days, at least about 7 days, at least about 8 days, or at least about 9 days, when assayed in an in vitro assay under comparable conditions.

[0449] Embodiment I-17. The SIRV of any one of embodiments I-1 to I-16, wherein cleavage by the RNP of the self-inactivating segments of the polynucleotide in a cell transfected or transduced with the SIRV has a k_{cleave} rate that is at least about 2-fold, at least about 4-fold, at least about 5-fold, at least about 6-fold, at least about 7-fold, at least about 8-fold, at least about 9-fold, or at least about 10-fold less than the k_{cleave} rate of the target nucleic acid in an in vitro cell-based assay, when assayed under comparable conditions.

[0450] Embodiment I-18. The SIRV of any one of embodiments I-1 to I-17, wherein cleavage by the RNP of the self-inactivating segment of the polynucleotide in a cell transduced or transfected with the SIRV results in reduced or eliminated expression of the Class 2 CRISPR protein or the gRNA encoded by the polynucleotide.

[0451] Embodiment I-19. The SIRV of any one of embodiments I-1 to I-18, wherein the Class 2 CRISPR protein further comprises one or more nuclear localization signals (NLS).

[0452] Embodiment I-20. The SIRV of embodiment I-19, wherein the one or more NLS are expressed at or near the C-terminus of the Class 2 CRISPR protein.

[0453] Embodiment I-21. The SIRV of embodiment I-19, wherein the one or more NLS are expressed at or near the N-terminus of the Class 2 CRISPR protein.

[0454] Embodiment I-22. The SIRV of embodiment I-19, comprising one or more NLS located at or near the N-terminus and at or near the C-terminus of the Class 2 CRISPR protein.

[0455] Embodiment I-23. The SIRV of any one of embodiments I-19 to I-22, wherein the one or more NLS are selected from the group of sequences consisting of PKKKRKV (SEQ ID NO: 344), KRPAATKKAGQAKKKK (SEQ ID NO: 345), PAAKRVKLD (SEQ ID NO: 346), RQRRNELKRSP (SEQ ID NO: 347), NQSSNFGPMKGGNFGGRSSGPYGGGGQYFAKPRNQGGY (SEQ ID NO: 348), RMRIZFKNKGKDTAELRRRRVEVSVELRKAKKDEQILKRRNV (SEQ ID NO: 349), VSRKRPRP (SEQ ID NO: 350), PPKKARED (SEQ ID NO: 351), PQPKKKPL (SEQ ID NO:352), SALIKKKKKMAP (SEQ ID NO: 353), DRLRR (SEQ ID NO: 354), PKQKKRK (SEQ ID NO: 355), RKLKKKIKKL (SEQ ID NO: 356), REKKKFLKRR (SEQ ID NO: 357), KRKGDEVDGVDEVAKKKSKK (SEQ ID NO: 358), RKCLQAGMNLEARKTKK (SEQ ID NO: 359), PRPRKIPR (SEQ ID NO: 360), PPRKKRTVV (SEQ ID NO: 361), NLSKKKKRKREK (SEQ ID NO: 362), RRPSRPFRKP (SEQ ID NO: 363), KRPRSPSS (SEQ ID NO: 364), KRGINDRNFWRGENERKTR (SEQ ID NO: 365), PRPPKMARYDN (SEQ ID NO: 366), KRSFSKAF (SEQ ID NO: 367), KLKIKRPVK (SEQ ID NO: 368), PKTRRRPRRSQRKRPPT (SEQ ID NO: 370), SRRRKANPTKLSENAKKLAKEVEN (SEQ ID NO: 371), KTRRRPRRSQRKRPPT (SEQ ID NO: 372), RRKKRRPRRKKRR (SEQ ID NO: 373), PKKKSRKPKKKSRK (SEQ ID NO: 374), HKKKHPDASVNFSEFSK (SEQ ID NO: 375), QRPGPYDRPQRPGPYDRP (SEQ ID NO: 376), LSPSLSPLLSPSLSPL (SEQ ID NO: 377), RGKGGKGLGKGGAKRHRK (SEQ ID NO: 378), PKRGRGRPKRGRGR (SEQ ID NO: 379), MSRRRKANPTKLSENAKKLAKEVEN (SEQ ID NO: 598), PKKKRKVPPPPAAKRVKLD (SEQ ID NO: 380), PKKKRKVPPPPKKKRKV (SEQ ID NO: 381), PAKRARRGYKC (SEQ ID NO: 382); KLGPRKATGRW (SEQ ID NO: 383), PRRKREE (SEQ ID NO: 384), PLRKRPRR (SEQ ID NO: 386), PLRKRPRRGSPLRKRPRR (SEQ ID NO: 387), PAAKRVKLDGGKRTADGSEFESPKKKRKV (SEQ ID NO: 388), PAAKRVKLDGGKRTADGSEFESPKKKRKVGIHGVPAA (SEQ ID NO: 389), PAAKRVKLDGGKRTADGSEFESPKKKRKVAEAAAKEAAAKEAAAKA (SEQ ID NO: 390), PAAKRVKLDGGKRTADGSEFESPKKKRKVPG (SEQ ID NO: 391), KRKGSPERGERKRHW (SEQ ID NO: 392), KRTADSQHSTPPKTKRKVEFEPKKKRKV (SEQ ID NO: 393), PKKKRKVGGSKRTADSQHSTPPKTKRKVEFEPKKKRKV (SEQ ID NO: 394), MAPKKKRKVSR (SEQ ID NO: 771), and MAPKKKRKVGGSPKKKRKVGGSPKKKRKVGGSPKKKRKVSR (SEQ ID NO: 772) wherein the one or more NLS are linked to the CRISPR protein or to adjacent NLS with a linker peptide wherein the linker peptide is selected from the group consisting of RS, (G)n (SEQ ID NO: 395), (GS)n (SEQ ID NO: 396), (GSGGS)n (SEQ ID NO: 397), (GGSGGS)n (SEQ ID NO: 398), (GGGS)n (SEQ ID NO: 399), GGSG (SEQ ID NO: 400), GGSGG (SEQ ID NO: 401), GSGSG (SEQ ID NO: 402), GSGGG (SEQ ID NO: 403), GGGSG (SEQ ID NO: 404), GSSSG (SEQ ID NO:405), GPGP (SEQ ID NO: 406), GGP, PPP, PPAPPA (SEQ ID NO: 407), PPPG (SEQ ID NO: 408), PPPGPPP (SEQ ID NO: 409), PPP(GGGS)n (SEQ ID NO: 410), (GGGS)nPPP (SEQ ID NO: 411), AEAAAKEAAAKEAAAKA (SEQ ID NO: 412), and TPPKTKRKVEFE (SEQ ID NO: 413), where n is 1 to 5.

[0456] Embodiment I-24. The SIRV of any one of embodiments I-19 to I-22, wherein the one or more encoded NLS are selected from the group consisting of SEQ ID NOS: 538-613 set for in Table 22 and Table 23, or a sequence having at least 85%, at least 90%, at least 95%, at least 95%, at least 96%, at least 97%, at least 98% identity thereto.

[0457] Embodiment I-25. The SIRV of any one of embodiments I-19 to I-22, wherein the one or more encoded NLS are selected from the group consisting of SEQ ID NOS: 538-597, 599-610, 613, 771-772, 844-846 and 2498-2591 set forth in Table 7, Table 22, and Table 23.

[0458] Embodiment I-26. The SIRV of any one of embodiments I-1 to I-25, wherein the Class 2 CRISPR protein is a CasX protein selected from the group of sequences consisting of SEQ ID NOs: 1-3, 49-321 and 2356-2488, or a sequence having at least about 70%, at least about 80%, at least about 80%, at least about 85%, at least about 90%, or at least about 95%, or at least about 95%, or at least about 96%, or at least about 97%, or at least about 98%, or at least about 99% sequence identity thereto.

[0459] Embodiment I-27. The SIRV of any one of embodiments I-1 to I-25, wherein the Class 2 CRISPR protein is a CasX protein having a sequence selected from the group of sequences consisting of SEQ ID NOs: 1-3 and 49-321 and 2356-2488.

[0460] Embodiment I-28. The SIRV of any one of embodiments I-1 to I-25, wherein the Class 2 CRISPR protein is a CasX protein comprising the sequence of SEQ ID NO: 138, or a sequence having at least about 70%, at least about 80%, at least about 80%, at least about 85%, at least about 90%, or at least about 95%, or at least about 95%, or at least about 96%, or at least about 97%, or at least about 98%, or at least about 99% sequence identity thereto.

[0461] Embodiment I-29. The SIRV of any one of embodiments I-1 to I-28, wherein the first gRNA has a scaffold comprising a sequence selected from the group of sequences consisting of SEQ ID NOS: 2101-2331 and 3992-3995, or a sequence having at least about 70%, at least about 80%, at least about 80%, at least about 85%, at least about 90%, or at least about 95%, or at least about 95%, or at least about 96%, or at least about 97%, or at least about 98%, or at least about 99% sequence identity thereto.

[0462] Embodiment I-30. The SIRV of any one of embodiments I-1 to I-28, wherein the first gRNA has a scaffold comprising a sequence selected from the group of sequences consisting of SEQ ID NOS: 2101-2331 and 3992-3995.

[0463] Embodiment I-31. The SIRV of any one of embodiments I-1 to I-28, wherein the first gRNA has a scaffold comprising the sequence of SEQ ID NO: 2296, or a sequence having at least about 70%, at least about 80%, at least about 80%, at least about 85%, at least about 90%, or at least about 95%, or at least about 95%, or at least about 96%, or at least about 97%, or at least about 98%, or at least about 99% sequence identity thereto.

[0464] Embodiment I-32. The SIRV of any one of embodiments I-1 to I-31, wherein the first gRNA comprises a targeting sequence having 15 nucleotides, 16 nucleotides, 17, nucleotides, 18 nucleotides, 19 nucleotides, or 20 nucleotides.

[0465] Embodiment I-33. The SIRV of any one of embodiments I-26 to I-31, wherein the CasX protein is capable of forming a ribonuclear protein complex (RNP) with the first gRNA upon expression in the cell.

[0466] Embodiment I-34. The SIRV of embodiment I-33, wherein the RNP is capable of cleaving the target nucleic acid and the self-inactivating segment.

[0467] Embodiment I-35. The SIRV of any one of embodiments I-1 to I-34, wherein the polynucleotide further comprises at least one accessory element sequence.

[0468] Embodiment I-36. The SIRV of embodiment I-35, wherein the at least one accessory element is selected from the group consisting of a poly(A) signal, a gene enhancer element, an intron, a posttranscriptional regulatory element (PTRE), a deaminase, a DNA glycosylase inhibitor, a promoter, a stimulator of CRISPR-mediated homology-directed repair, an activator or repressor of transcription, and a self-cleaving sequence.

[0469] Embodiment I-37. The SIRV of embodiment I-36, wherein the PTRE is selected from the group consisting of cytomegalovirus immediate/early intronA, hepatitis B virus PRE (HPRE), Woodchuck Hepatitis virus PRE (WPRE), and 5′ untranslated segment (UTR) of human heat shock protein 70 mRNA (Hsp70).

[0470] Embodiment I-38. The SIRV of embodiment I-36, wherein the PTRE comprises a sequence selected from the group consisting of SEQ ID NOS: 524-526.

[0471] Embodiment I-39. The SIRV of any one of embodiments I-35 to I-38, wherein the at least one accessory element enhances the expression, binding, activity, or performance of the CRISPR protein in the cell transduced or transfected with the SIRV as compared to the CRISPR protein in the absence of said accessory element.

[0472] Embodiment I-40. The SIRV of embodiment I-39, wherein the enhancement results in an increase in editing of a target nucleic acid in a cell-based timed in vitro assay of at least about 10%, at least about 20%, at least about 30%, at least about 40%, at least about 50%, at least about 60%, at least about 70%, at least about 80%, at least about 90%, at least about 100%, at least about 150%, at least about 200%, or at least about 300%.

[0473] Embodiment I-41. The SIRV of any one of embodiments I-1 to I-40, wherein the packaging element is selected from the group consisting of AAV 5′ and 3′ inverted terminal repeats (ITR), adenovirus packaging protein, lentiviral psi packaging element, and gammaretroviral psi packaging element.

[0474] Embodiment I-42. The SIRV of embodiment I-41, wherein the AAV 5′ and 3′ ITRs are derived from serotype AAV1, AAV2, AAV3, AAV4, AAV5, AAV6, AAV7, AAV8, AAV9, AAV10, AAV11, AAV12, AAV 44.9, AAV 9.45, AAV 9.61, AAV-Rh74, AAVRh10, or chimeric combinations thereof.

[0475] Embodiment I-43. The SIRV of embodiment I-42, wherein the ITRs are derived from serotype AAV2.

[0476] Embodiment I-44. An SIRV comprising a polynucleotide comprising one or more components selected from:
[0477] a) one or more packaging components;
[0478] b) a sequence encoding a Class 2 CRISPR protein;
[0479] c) a first promoter operably linked to the sequence encoding the Class 2 CRISPR protein;
[0480] d) a sequence encoding a first guide RNA (gRNA) comprising a scaffold sequence and a linked targeting sequence that is complementary to a target nucleic acid of a cell to be modified;
[0481] e) a second promoter sequence operably linked to the sequence encoding the first gRNA;
[0482] f) a sequence encoding a second gRNA comprising a targeting sequence complementary to one or more self-inactivating segments of the SIRV, wherein the second gRNA comprises a scaffold sequence identical to the scaffold sequence of the first gRNA and the targeting sequence has a lower binding affinity to one or more self-inactivating segments compared to the binding affinity of the targeting sequence of the first gRNA to the target nucleic acid;
[0483] g) a sequence encoding a second gRNA comprising a targeting sequence complementary to the one or more self-inactivating segments, the second gRNA comprising a scaffold sequence different from the scaffold sequence of the first gRNA, wherein the second gRNA promotes less efficient editing and/or cleavage by an RNP comprising the Class 2 CRISPR protein and the second gRNA compared to an RNP comprising the Class 2 CRISPR protein and the first gRNA;
[0484] h) a sequence encoding a second gRNA comprising a targeting sequence complementary to both a target nucleic acid of a cell to be modified and to one or more self-inactivating segments of the SIRV, wherein the second gRNA comprises a scaffold sequence identical to the scaffold sequence of the first gRNA, wherein:
   [0485] i) the PAM sequence of the one or more self-inactivating segments is different by at least one nucleotide from the PAM sequence of the target nucleic acid of the cell to be modified and promotes less efficient cleavage or rate of cleavage of the self-inactivating segment by the RNP compared to the target nucleic acid of the cell to be modified; and
   [0486] ii) the targeting sequence of the second gRNA is complementary to different or overlapping regions of the target nucleic acid sequence compared to the targeting sequence of the first gRNA;
[0487] i) a third promoter sequence operably linked to the sequence encoding the second gRNA; and
[0488] j) one or more self-inactivating segments comprising a protospacer adjacent motif (PAM) sequence and a polynucleotide sequence capable of being bound and cleaved by a ribonuclear protein complex (RNP) of the Class 2 CRISPR protein and the second gRNA.

[0489] Embodiment I-45. The SIRV of embodiment I-44, comprising components (a)-(f), (i) and (j).

[0490] Embodiment I-46. The SIRV of embodiment I-44, comprising components (a)-(e), (g), (i) and (j).

[0491] Embodiment I-47. The SIRV of embodiment I-44, comprising components (a)-(e), and (h)-(j).

[0492] Embodiment I-48. The SIRV of any one of embodiments I-44 to I-46, wherein the one or more self-inactivating segments of the polynucleotide are located:
[0493] a) 5′ or 3′ adjacent to or within the sequence encoding the Class 2 CRISPR protein;
[0494] b) 5′ or 3′ adjacent to or within a Kozak sequence located between the first promoter and the sequence encoding the Class 2 CRISPR protein;
[0495] c) 5′ or 3′ adjacent to or within to the first promoter sequence;
[0496] d) 5′ or 3′ adjacent to or within the second promoter sequence;
[0497] e) 5′ or 3′ adjacent to or within the third promoter sequence;
[0498] f) downstream of the transcriptional start site for the sequence encoding the Class 2 CRISPR protein;
[0499] g) within one or more inserted introns in the polynucleotide encoding the Class 2 CRISPR protein;
[0500] h) at the 3′ end of the polynucleotide encoding the Class 2 CRISPR protein, between a stop codon and poly(A) termination site of the sequence encoding the Class 2 CRISPR; or
[0501] i) any combination of (a)-(h).

[0502] Embodiment I-49. The SIRV of embodiment I-47, wherein the self-inactivating segment comprises a 15-21 nucleotide sequence complementary to the targeting sequence of the second gRNA that is 3′ adjacent to a PAM sequence recognized by an RNP of the Class 2 CRISPR protein and the second gRNA.

[0503] Embodiment I-50. The SIRV of any one of embodiments I-44 to I-49, wherein cleavage of the self-inactivating segments in a cell transduced or transfected with the SIRV by the RNP of the Class 2 CRISPR protein and the second gRNA results in reduced or eliminated expression of the Class 2 CRISPR protein or the gRNA encoded by the polynucleotide.

[0504] Embodiment I-51. The SIRV of any one of embodiments I-44 to I-50, wherein the PAM sequence of the one or more self-inactivating segments:
[0505] a) is identical to the PAM sequence of the target nucleic acid of the cell to be modified; and
[0506] b) promotes less efficient cleavage or rate of cleavage of the self-inactivating segment by the RNP of the Class 2 CRISPR protein and the second gRNA compared to the PAM sequence 5′ and adjacent to the target nucleic acid of the cell to be modified.

[0507] Embodiment I-52. The SIRV of embodiment I-51, wherein the PAM sequence of the target nucleic acid is NTN.

[0508] Embodiment I-53. The SIRV of any one of embodiments I-44 to I-52, wherein the PAM sequence of the one or more self-inactivating segments:
[0509] a) is different from the PAM sequence of the target nucleic acid of the cell to be modified; and
[0510] b) promotes less efficient cleavage or rate of cleavage of the self-inactivating segment by the RNP of the Class 2 CRISPR protein and the second gRNA compared to the PAM of the target nucleic acid of the cell to be modified.

[0511] Embodiment I-54. The SIRV of embodiment I-53, wherein:
[0512] a) if the PAM sequence of the target nucleic acid of the cell to be modified is TTC and the PAM preference of the Class 2 CRISPR protein is TTC, then the PAM sequence of the one or more self-inactivating segments is selected from the group consisting of ATC, CTC, TTT, GTT, and GTC;
[0513] b) if the PAM sequence of the target nucleic acid of the cell to be modified is ATC and the PAM preference of the Class 2 CRISPR protein is TTC, then the PAM sequence of the one or more self-inactivating segments is selected from the group consisting of CTC, TTT, GTT, and GTC; or
[0514] c) if the PAM sequence of the target nucleic acid of the cell to be modified is CTC and the PAM preference of the Class 2 CRISPR protein is TTC, then the PAM sequence of the one or more self-inactivating segments is GTC, TTT, ATC, or GTT.

[0515] Embodiment I-55. The SIRV of embodiment I-53, wherein:
[0516] a) if the PAM sequence of the target nucleic acid of the cell to be modified is ATC and the PAM preference of the Class 2 CRISPR protein is ATC, then the PAM sequence of the one or more self-inactivating segments is selected from the group consisting of TTC, CTC, TTT, GTT, and GTC;
[0517] b) if the PAM sequence of the target nucleic acid of the cell to be modified is CTC and the PAM preference of the Class 2 CRISPR protein is ATC, then the PAM sequence of the one or more self-inactivating segments is selected from the group consisting of TTC, TTT, GTT, and GTC; or
[0518] c) if the PAM sequence of the target nucleic acid of the cell to be modified is GTC and the PAM preference of the Class 2 CRISPR protein is ATC, then the PAM sequence of the one or more self-inactivating segments is TTC, TTT, CTC, or GTT.

[0519] Embodiment I-56. The SIRV of embodiment I-53, wherein:
[0520] a) if the PAM sequence of the target nucleic acid of the cell to be modified is GTC and the PAM preference of the Class 2 CRISPR protein is GTC, then the PAM sequence of the one or more self-inactivating segments is selected from the group consisting of ATC, CTC, TTT, GTT, and TTC.
[0521] b) if the PAM sequence of the target nucleic acid of the cell to be modified is GTC and the PAM preference of the Class 2 CRISPR protein is ATC, then the PAM sequence of the one or more self-inactivating segments is selected from the group consisting of TTC, TTT, GTT, and CTC; or
[0522] c) if the PAM sequence of the target nucleic acid of the cell to be modified is CTC and the PAM preference of the Class 2 CRISPR protein is GTC, then the PAM sequence of the one or more self-inactivating segments is TTC, TTT, ATC, or GTT.

[0523] Embodiment I-57. The SIRV of embodiment I-53, wherein:
[0524] a) if the PAM sequence of the target nucleic acid of the cell to be modified is CTC and the PAM preference of the Class 2 CRISPR protein is CTC, then the PAM sequence of the one or more self-inactivating segments is selected from the group consisting of ATC, GTC, TTT, GTT, and TTC.
[0525] b) if the PAM sequence of the target nucleic acid of the cell to be modified is ATC and the PAM preference of the Class 2 CRISPR protein is CTC, then the PAM sequence of the one or more self-inactivating segments is selected from the group consisting of GTC, TTT, GTT, and TTC; or
[0526] c) if the PAM sequence of the target nucleic acid of the cell to be modified is GTC and the PAM preference of the Class 2 CRISPR protein is CTC, then the PAM sequence of the one or more self-inactivating segments is TTC, TTT, ATC, or GTT.

[0527] Embodiment I-58. The SIRV of any one of embodiments I-44 to I-57, wherein the one or more self-inactivating segment sequences each have between 1 to 5 bases that are not complementary to corresponding positions in the targeting sequence of the second gRNA.

[0528] Embodiment I-59. The SIRV of embodiment I-58, wherein the one or more self-inactivating segments each have between 1 to 3 bases that are not complementary to corresponding positions in the targeting sequence of the second gRNA.

[0529] Embodiment I-60. The SIRV of embodiment I-58 or I-59, wherein the base differences of the one or more self-inactivating segments are relative to positions that correspond to positions that are 3′ to the fourth nucleotide of the targeting sequence of the second gRNA when the two sequences are aligned.

[0530] Embodiment I-61. The SIRV of any of embodiments I-51 to I-60, wherein the RNP of the Class 2 CRISPR protein and second gRNA exhibit less efficient cleavage of the self-inactivating segment compared to the cleavage of the target nucleic acid of the cell by the RNP of the Class 2 CRISPR protein and first gRNA.

[0531] Embodiment I-62. The SIRV of any one of embodiments I-44 to I-61, wherein the third promoter sequence is different from the second promoter sequence and is less efficient at initiating transcription of the second gRNA compared to the second promoter initiating transcription of the first gRNA.

[0532] Embodiment I-63. The SIRV of embodiment I-62, wherein the second and the third promoter are selected from the group consisting of U6, mini U6, 5S, Adenovirus 2 (Ad2) VAI, 7SK, H1, bidirectional H1, bidirectional U6, bidirectional 7SK, and bidirectional U6.

[0533] Embodiment I-64. The SIRV of embodiment I-62, wherein the second and the third promoter are selected from the group consisting of the sequences of SEQ ID NOS: 494-513, and 2688-2708 as set forth in Table 25, or a sequence at least about 80% identical, at least about 85% identical, at least about 90% identical, at least about 91% identical, at least about 92% identical, at least about 93% identical, at least about 94% identical, at least about 95% identical, at least about 96% identical, at least about 97% identical, at least about 98% identical or at least about 99% identical thereto.

[0534] Embodiment I-65. The SIRV of any one of embodiments I-62 to I-64, wherein the second promoter is U6 and the third promoter is selected from the group consisting of H1, 7SK, and mini U6.

[0535] Embodiment I-66. The SIRV of any one of embodiments I-44 to I-65, wherein the Class 2 CRISPR protein further comprises one or more nuclear localization signals (NLS).

[0536] Embodiment I-67. The SIRV of embodiment I-66, wherein the one or more NLS are expressed at or near the C-terminus of the CRISPR protein.

[0537] Embodiment I-68. The SIRV of embodiment I-66, wherein the one or more NLS are expressed at or near the N-terminus of the CRISPR protein.

[0538] Embodiment I-69. The SIRV of embodiment I-66, comprising one or more NLS located at or near the N-terminus and at or near the C-terminus of the CRISPR protein.

[0539] Embodiment I-70. The SIRV of any one of embodiments I-66 to I-69, wherein the one or more NLS are selected from the group of sequences consisting of PKKKRKV (SEQ ID NO: 344), KRPAATKKAGQAKKKK (SEQ ID NO: 345), PAAKRVKLD (SEQ ID NO: 346), RQRRNELKRSP (SEQ ID NO: 347), NQSSNFGPMKGGNFGGRSSGPYGGGGQYFAKPRNQGGY (SEQ ID NO: 348), RMRIZFKNKGKDTAELRRRRVEVSVELRKAKKDEQILKRRNV (SEQ ID NO: 349), VSRKRPRP (SEQ ID NO: 350), PPKKARED (SEQ ID NO: 351), PQPKKKPL (SEQ ID NO:352), SALIKKKKKMAP (SEQ ID NO: 353), DRLRR (SEQ ID NO: 354), PKQKKRK (SEQ ID NO: 355), RKLKKKIKKL (SEQ ID NO: 356), REKKKFLKRR (SEQ ID NO: 357), KRKGDEVDGVDEVAKKKSKK (SEQ ID NO: 358), RKCLQAGMNLEARKTKK (SEQ ID NO: 359), PRPRKIPR (SEQ ID NO: 360), PPRKKRTVV (SEQ ID NO: 361), NLSKKKKRKREK (SEQ ID NO: 362), RRPSRPFRKP (SEQ ID NO: 363), KRPRSPSS (SEQ ID NO: 364), KRGINDRNFWRGENERKTR (SEQ ID NO: 365), PRPPKMARYDN (SEQ ID NO: 366), KRSFSKAF (SEQ ID NO: 367), KLKIKRPVK (SEQ ID NO: 368), PKTRRRPRRSQRKRPPT (SEQ ID NO: 370), SRRRKANPTKLSENAKKLAKEVEN (SEQ ID NO: 371), KTRRRPRRSQRKRPPT (SEQ ID NO: 372), RRKKRRPRRKKRR (SEQ ID NO: 373), PKKKSRKPKKKSRK (SEQ ID NO: 374), HKKKHPDASVNFSEFSK (SEQ ID NO: 375), QRPGPYDRPQRPGPYDRP (SEQ ID NO: 376), LSPSLSPLLSPSLSPL (SEQ ID NO: 377), RGKGGKGLGKGGAKRHRK (SEQ ID NO: 378), PKRGRGRPKRGRGR (SEQ ID NO: 379), MSRRRKANPTKLSENAKKLAKEVEN (SEQ ID NO: 598), PKKKRKVPPPPAAKRVKLD (SEQ ID NO: 380), PKKKRKVPPPPKKKRKV (SEQ ID NO: 381), PAKRARRGYKC (SEQ ID NO: 382); KLGPRKATGRW (SEQ ID NO: 383), PRRKREE (SEQ ID NO: 384), PLRKRPRR (SEQ ID NO: 386), PLRKRPRRGSPLRKRPRR (SEQ ID NO: 387), PAAKRVKLDGGKRTADGSEFESPKKKRKV (SEQ ID NO: 388), PAAKRVKLDGGKRTADGSEFESPKKKRKVGIHGVPAA (SEQ ID NO: 389), PAAKRVKLDGGKRTADGSEFESPKKKRKVAEAAAKEAAAKEAAAKA (SEQ ID NO: 390), PAAKRVKLDGGKRTADGSEFESPKKKRKVPG (SEQ ID NO: 391), KRKGSPERGERKRHW (SEQ ID NO: 392), KRTADSQHSTPPKTKRKVEFEPKKKRKV (SEQ ID NO: 393), PKKKRKVGGSKRTADSQHSTPPKTKRKVEFEPKKKRKV (SEQ ID NO: 394), MAPKKKRKVSR (SEQ ID NO: 771), and MAPKKKRKVGGSPKKKRKVGGSPKKKRKVGGSPKKKRKVSR (SEQ ID NO: 772) wherein the one or more NLS are linked to the CRISPR protein or to adjacent NLS with a linker peptide wherein the linker peptide is selected from the group consisting of (G)n (SEQ ID NO: 395), (GS)n (SEQ ID NO: 396), (GSGGS)n (SEQ ID NO: 397), (GGSGGS)n (SEQ ID NO: 398), (GGGS)n (SEQ ID NO: 399), GGSG (SEQ ID NO: 400), GGSGG (SEQ ID NO: 401), GSGSG (SEQ ID NO: 402), GSGGG (SEQ ID NO: 403), GGGSG (SEQ ID NO: 404), GSSSG (SEQ ID NO:405), GPGP (SEQ ID NO: 406), GGP, PPP, PPAPPA (SEQ ID NO: 407), PPPG (SEQ ID NO: 408), PPPGPPP (SEQ ID NO: 409), PPP(GGGS)n (SEQ ID NO: 410), (GGGS)nPPP (SEQ ID NO: 411), AEAAAKEAAAKEAAAKA (SEQ ID NO: 412), wherein the one or more NLS are linked to the CRISPR protein or to adjacent NLS with a linker peptide wherein the linker peptide is selected from the group consisting of RS, (G)n (SEQ ID NO: 395), (GS)n (SEQ ID NO: 396), (GSGGS)n (SEQ ID NO: 397), (GGSGGS)n (SEQ ID NO: 398), (GGGS)n (SEQ ID NO: 399), GGSG (SEQ ID NO: 400), GGSGG (SEQ ID NO: 401), GSGSG (SEQ ID NO: 402), GSGGG (SEQ ID NO: 403), GGGSG (SEQ ID NO: 404), GSSSG (SEQ ID NO:405), GPGP (SEQ ID NO: 406), GGP, PPP, PPAPPA (SEQ ID NO: 407), PPPG (SEQ ID NO: 408), PPPGPPP (SEQ ID NO: 409), PPP(GGGS)n (SEQ ID NO: 410), (GGGS)nPPP (SEQ ID NO: 411), AEAAAKEAAAKEAAAKA (SEQ ID NO: 412), and TPPKTKRKVEFE (SEQ ID NO: 413), where n is 1 to 5.

[0540] Embodiment I-71. The SIRV of any one of embodiments I-66 to I-69, wherein the one or more encoded NLS are selected from the group consisting of SEQ ID NOS: 538-597, 599-610, 613, 771-772, 844-846, and 2498-2591, or a sequence having at least 85%, at least 90%, at least 95%, at least 95%, at least 96%, at least 97%, or at least 98% identity thereto.

[0541] Embodiment I-72. The SIRV of any one of embodiments I-66 to I-69, wherein the one or more encoded NLS are selected from the group consisting of SEQ ID NOS: 538-597, 599-610, 613, 771-772, 844-846, 2498-2591.

[0542] Embodiment I-73. The SIRV of any one of embodiments I-44 to I-72, wherein the CRISPR protein is a CasX protein selected from the group consisting of SEQ ID NOs: 1-3 and 49-321 and 2356-2488, or a sequence having at least about 70%, at least about 80%, at least about 80%, at least about 85%, at least about 90%, or at least about 95%, or at least about 95%, or at least about 96%, or at least about 97%, or at least about 98%, or at least about 99% sequence identity thereto.

[0543] Embodiment I-74. The SIRV of any one of embodiments I-44 to I-72, wherein the CRISPR protein is a CasX protein selected from the group consisting of SEQ ID NOs: 1-3 and 49-321 and 2356-2488.

[0544] Embodiment I-75. The SIRV of any one of embodiments I-44 to I-72, wherein the Class 2 CRISPR protein is a CasX protein comprising the sequence of SEQ ID NO: 138, or a sequence having at least about 70%, at least about 80%, at least about 80%, at least about 85%, at least about 90%, or at least about 95%, or at least about 95%, or at least about 96%, or at least about 97%, or at least about 98%, or at least about 99% sequence identity thereto.

[0545] Embodiment I-76. The SIRV of any one of embodiments I-44 to I-74, wherein the second guide comprises a sequence selected from the group consisting of SEQ ID NO: 2101-2238 and the first guide comprises a sequence selected from the group consisting of SEQ ID NOS: 2276-2296.

[0546] Embodiment I-77. The SIRV of embodiment I-75, wherein the second guide comprises the sequence of SEQ ID NO: 2238 and the first guide comprises the sequence of SEQ ID NO: 2296.

[0547] Embodiment I-78. The SIRV of any one of embodiments I-44 to I-77, wherein the first and second gRNA each comprise a targeting sequence having 15 nucleotides, 16 nucleotides, 17, nucleotides, 18 nucleotides, 19 nucleotides, or 20 nucleotides.

[0548] Embodiment I-79. The SIRV of any one of embodiments I-73 to I-78, wherein the CasX protein is capable of forming a ribonuclear protein complex (RNP) with the first gRNA and the second gRNA upon expression in a cell transduced or transfected with the SIRV.

[0549] Embodiment I-80. The SIRV of embodiment I-79, wherein the RNP of the CasX protein and the first gRNA is capable of cleaving the target nucleic acid.

[0550] Embodiment I-81. The SIRV of embodiment I-79, wherein the RNP of the CasX protein and the second gRNA is capable of cleaving the self-inactivating segment.

[0551] Embodiment I-82. The SIRV of embodiment I-81, wherein the RNP of the CasX protein and the second gRNA exhibit a cleavage rate of the self-inactivating segments that is less efficient compared to the cleavage or rate of cleavage of the target nucleic acid by an RNP of the CasX protein and the first gRNA.

[0552] Embodiment I-83. The SIRV of embodiment I-81, wherein the percent cleavage of the self-inactivating segments by the RNP of the CasX protein and the second gRNA is at least about 10%, at least about 20%, at least about 30%, at least about 40%, at least about 50%, at least about 60%, at least about 70%, at least about 80%, or at least about 90% less than the cleavage of the target nucleic acid in a timed in vitro cell-based assay, when assayed under comparable conditions.

[0553] Embodiment I-84. The SIRV of embodiment I-81, wherein the time to achieve 90% cleavage of the self-inactivating segments by the RNP of the CasX protein and the second gRNA is delayed, relative to the time to achieve 90% editing of the target nucleic acid by an RNP of the CasX protein and the first gRNA, by at least about 1 day, at least about 2 days, at least about 3 days, at least about 4 days, at least about 5 days, at least about 6 days, at least about 7 days, at least about 8 days, or at least about 9 days, when assayed in an in vitro assay under comparable conditions.

[0554] Embodiment I-85. The SIRV of embodiment I-81, wherein cleavage of the self-inactivating segments by the RNP of the CasX protein and the second gRNA has a k_{cleave} rate that is at least about 2-fold, at least about 4-fold, at least about 5-fold, at least about 6-fold, at least about 7-fold, at least about 8-fold, at least about 9-fold, or at least about 10-fold less than the k_{cleave} rate of the target nucleic acid by an RNP of the CasX protein and the first gRNA in an in vitro cell-based assay, when assayed under comparable conditions.

[0555] Embodiment I-86. The SIRV of any one of embodiments I-44 to I-85, further comprising at least one accessory element sequence.

[0556] Embodiment I-87. The SIRV of embodiment I-86, wherein the accessory element is selected from the group consisting of a poly(A) signal, a gene enhancer element, an intron, a posttranscriptional regulatory element (PTRE), a deaminase, a DNA glycosylase inhibitor, a promoter, a stimulator of CRISPR-mediated homology-directed repair, an activator or repressor of transcription, and a self-inactivating sequence.

[0557] Embodiment I-88. The SIRV of embodiment I-87, wherein the PTRE is selected from the group consisting of cytomegalovirus immediate/early intronA, hepatitis B virus PRE (HPRE), Woodchuck Hepatitis virus PRE (WPRE), and 5′ untranslated segment (UTR) of human heat shock protein 70 mRNA (Hsp70).

[0558] Embodiment I-89. The SIRV of any one of embodiments I-86 to I-88, wherein the accessory element(s) enhance the expression, binding, activity, or performance of the CRISPR protein in the transduced or transfected cell as compared to the CRISPR protein in the absence of said accessory element.

[0559] Embodiment I-90. The SIRV of embodiment I-89, wherein the enhancement is an increase in editing of a target nucleic acid in a timed in vitro assay of at least about 10%, at least about 20%, at least about 30%, at least about 40%, at least about 50%, at least about 60%, at least about 70%, at least about 80%, at least about 90%, at least about 100%, at least about 150%, at least about 200%, or at least about 300%.

[0560] Embodiment I-91. The SIRV of any one of embodiments I-44 to I-90, wherein the packaging element is selected from the group consisting of AAV 5′ and 3′ inverted terminal repeats (ITR), adenovirus packaging protein, lentiviral psi packaging element, and gammaretroviral psi packaging element.

[0561] Embodiment I-92. The SIRV of embodiment I-91, wherein the AAV 5′ and 3′ ITRs are derived from serotype AAV1, AAV2, AAV3, AAV4, AAV5, AAV6, AAV7, AAV8, AAV9, AAV10, AAV11, AAV12, AAV 44.9, AAV 9.45, AAV 9.61, AAV-Rh74, AAVRh10, or a chimeric combination thereof.

[0562] Embodiment I-93. The SIRV of embodiment I-92, wherein the ITRs are derived from serotype AAV2.

[0563] Embodiment I-94. A SIRV comprising a polynucleotide comprising one or more components selected from:
[0564] a) one or more packaging components;
[0565] b) a sequence encoding a Class 2 CRISPR protein;
[0566] c) a first promoter operably linked to the sequence encoding the Class 2 CRISPR protein;
[0567] d) a sequence encoding a first guide RNA (gRNA) scaffold and a targeting sequence that is complementary to a target nucleic acid of a cell to be modified;
[0568] e) a second promoter sequence operably linked to the sequence encoding the first gRNA;
[0569] f) a sequence encoding a second guide RNA (gRNA) and a targeting sequence complementary to one or more self-inactivating segments of the SIRV;
[0570] g) a third promoter sequence operably linked to the sequence encoding the second gRNA, wherein the third promoter has a sequence different from the sequence of the second promoter; and
[0571] h) one or more self-inactivating segments of the polynucleotide comprising a protospacer adjacent motif (PAM) sequence and a polynucleotide sequence capable of being bound and cleaved by a ribonuclear protein complex (RNP) of the Class 2 CRISPR protein and the second gRNA.

[0572] Embodiment I-95. The SIRV of embodiment I-94, comprising components (a)-(h).

[0573] Embodiment I-96. The SIRV of embodiment I-94 or I-95, wherein the third promoter is less efficient at initiating transcription of the second gRNA compared to the ability of the second promoter to initiate transcription of the first gRNA.

[0574] Embodiment I-97. The SIRV of any one of embodiments I-94 to I-96, wherein the one or more self-inactivating segments of the polynucleotide are located at a position:
[0575] a) 5′ or 3′ adjacent to or within the sequence encoding the Class 2 CRISPR protein;
[0576] b) 5′ or 3′ adjacent to or within a Kozak sequence located between the first promoter and the sequence encoding the Class 2 CRISPR protein;
[0577] c) 5′ or 3′ adjacent to or within to the first promoter sequence;
[0578] d) 5′ or 3′ adjacent to or within the second promoter sequence;
[0579] e) downstream of the transcriptional start site for the sequence encoding the Class 2 CRISPR protein;
[0580] f) within one or more inserted introns in the polynucleotide encoding the Class 2 CRISPR protein;
[0581] g) at the 3′ end of the polynucleotide encoding the Class 2 CRISPR protein, between the stop codon and poly(A) termination site; or
[0582] h) any combination of (a)-(g).

[0583] Embodiment I-98. The SIRV of embodiment I-97, wherein the self-inactivating segment comprises any 15-21 nucleotide sequence portion of the positions of embodiment I-97 that is 3′ adjacent to a PAM sequence recognized by an RNP of the Class 2 CRISPR protein and the second gRNA.

[0584] Embodiment I-99. The SIRV of any one of embodiments I-94 to I-98, wherein the second and the third promoters are independently selected from the group consisting of U6, mini U6, 5S, Adenovirus 2 (Ad2) VAI, 7SK, H1, bidirectional H1, bidirectional U6, bidirectional 7SK, and bidirectional U6.

[0585] Embodiment I-100. The SIRV of any one of embodiments I-94 to I-99, wherein the second and the third promoters are selected from the group consisting of the sequences of SEQ ID NOS: 494-513, and 2688-2708, or a sequence having at least about 80% identical, at least about 85% identical, at least about 90% identical, at least about 91% identical, at least about 92% identical, at least about 93% identical, at least about 94% identical, at least about 95% identical, at least about 96% identical, at least about 97% identical, at least about 98% identical or at least about 99% identical thereto.

[0586] Embodiment I-101. The SIRV of any one of embodiments I-94 to I-99, wherein the second and the third promoters are selected from the group consisting of the sequences of SEQ ID NOS: 494-513 and 2688-2708.

[0587] Embodiment I-102. The SIRV of any one of embodiments I-99 to I-101, wherein the second promoter is U6 and the third promoter is selected from the group consisting of H1, 7SK, and mini U6.

[0588] Embodiment I-103. The SIRV of any one of embodiments I-94 to I-102, wherein cleavage of the self-inactivating segments of the polynucleotide in a cell transduced or transfected with the SIRV by the RNP of the Class 2 CRISPR protein and the second gRNA results in reduced or eliminated expression of the Class 2 CRISPR protein or the gRNA encoded by the polynucleotide.

[0589] Embodiment I-104. The SIRV of any one of embodiments I-94 to I-103, wherein the PAM sequence of the one or more self-inactivating segments:
[0590] a) is identical to the PAM sequence of the target nucleic acid of the cell to be modified; and
[0591] b) promotes less efficient cleavage or rate of cleavage of the self-inactivating segment by the RNP compared to the PAM sequence 5′ and adjacent to the target nucleic acid of the cell to be modified.

[0592] Embodiment I-105. The SIRV of embodiment I-104, wherein the PAM sequence of the target nucleic acid is NTN.

[0593] Embodiment I-106. The SIRV of any one of embodiments I-94 to I-105, wherein the PAM sequence of the one or more self-inactivating segments:
[0594] a) is different from the PAM sequence of the target nucleic acid of the cell to be modified; and
[0595] b) promotes less efficient cleavage or cleavage rate of the self-inactivating segment by the RNP compared to the PAM of the target nucleic acid of the cell.

[0596] Embodiment I-107. The SIRV of embodiment I-106, wherein:
[0597] a) if the PAM sequence of the target nucleic acid of the cell to be modified is TTC and the PAM preference of the Class 2 CRISPR protein is TTC, then the PAM sequence of the one or more self-inactivating segments is selected from the group consisting of ATC, CTC, TTT, GTT, and GTC;
[0598] b) if the PAM sequence of the target nucleic acid of the cell to be modified is ATC and the PAM preference of the Class 2 CRISPR protein is TTC, then the PAM sequence of the one or more self-inactivating segments is selected from the group consisting of CTC, TTT, GTT, and GTC; or
[0599] c) if the PAM sequence of the target nucleic acid of the cell to be modified is CTC and the PAM preference of the Class 2 CRISPR protein is TTC, then the PAM sequence of the one or more self-inactivating segments is GTC, TTT, or GTT.

[0600] Embodiment I-108. The SIRV of embodiment I-106, wherein:
[0601] a) if the PAM sequence of the target nucleic acid of the cell to be modified is ATC and the PAM preference of the Class 2 CRISPR protein is ATC, then the PAM sequence of the one or more self-inactivating segments is selected from the group consisting of TTC, CTC, TTT, GTT, and GTC;
[0602] b) if the PAM sequence of the target nucleic acid of the cell to be modified is CTC and the PAM preference of the Class 2 CRISPR protein is ATC, then the PAM sequence of the one or more self-inactivating segments is selected from the group consisting of TTC, TTT, GTT, and GTC; or
[0603] c) if the PAM sequence of the target nucleic acid of the cell to be modified is GTC and the PAM preference of the Class 2 CRISPR protein is ATC, then the PAM sequence of the one or more self-inactivating segments is TTC.

[0604] Embodiment I-109. The SIRV of embodiment I-106, wherein:
[0605] a) if the PAM sequence of the target nucleic acid of the cell to be modified is GTC and the PAM preference of the Class 2 CRISPR protein is GTC, then the PAM sequence of the one or more self-inactivating segments is selected from the group consisting of ATC, CTC, TTT, GTT, and TTC.
[0606] b) if the PAM sequence of the target nucleic acid of the cell to be modified is GTC and the PAM preference of the Class 2 CRISPR protein is ATC, then the PAM sequence of the one or more self-inactivating segments is selected from the group consisting of TTC, TTT, GTT, and CTC; or
[0607] c) if the PAM sequence of the target nucleic acid of the cell to be modified is CTC and the PAM preference of the Class 2 CRISPR protein is GTC, then the PAM sequence of the one or more self-inactivating segments is TTC, TTT, or GTT.

[0608] Embodiment I-110. The SIRV of embodiment I-106, wherein:
[0609] a) if the PAM sequence of the target nucleic acid of the cell to be modified is CTC and the PAM preference of the Class 2 CRISPR protein is CTC, then the PAM sequence of the one or more self-inactivating segments is selected from the group consisting of ATC, GTC, TTT, GTT, and TTC.
[0610] b) if the PAM sequence of the target nucleic acid of the cell to be modified is ATC and the PAM preference of the Class 2 CRISPR protein is CTC, then the PAM sequence of the one or more self-inactivating segments is selected from the group consisting of GTC, TTT, GTT, and TTC; or
[0611] c) if the PAM sequence of the target nucleic acid of the cell to be modified is GTC and the PAM preference of the Class 2 CRISPR protein is CTC, then the PAM sequence of the one or more self-inactivating segments is TTC, TTT, or GTT.

[0612] Embodiment I-111. The SIRV of any one of embodiments I-94 to I-110, wherein the one or more self-inactivating segment sequences:
[0613] a) each have between 1 to 5 bases that are not complementary to corresponding positions in the targeting sequence of the second gRNA; and
[0614] b) exhibit less efficient cleavage of the self-inactivating segment by the RNP of the Class 2 CRISPR protein and second gRNA compared to the cleavage of the target nucleic acid of the cell by the RNP of the Class 2 CRISPR protein and first gRNA.

[0615] Embodiment I-112. The SIRV of embodiment I-111, wherein the one or more self-inactivating segments each have between 1 to 3 bases that are not complementary to corresponding positions in the targeting sequence of the second gRNA.

[0616] Embodiment I-113. The SIRV of embodiments I-111 and I-112, wherein the base differences of the one or more self-inactivating segments are relative to positions that correspond to positions that are 3′ to the fourth nucleotide of the targeting sequence of the first gRNA when the two sequences are aligned.

[0617] Embodiment I-114. The SIRV of any one of embodiments I-101 to I-113, wherein the cleavage of the self-inactivating segments is at least about 10%, at least about 20%, at least about 30%, at least about 40%, at least about 50%, at least about 60%, at least about 70%, at least about 80%, or at least about 90% less than the cleavage of the target nucleic acid in a timed in vitro cell-based assay, when assayed under comparable conditions.

[0618] Embodiment I-115. The SIRV of any one of embodiments I-101 to I-113, wherein the cleavage of the self-inactivating segments in a cell transduced or transfected with the SIRV by the RNP to achieve 90% cleavage is delayed, relative to the time to achieve 90% editing of the target nucleic acid in the cell by at least about 1 day, at least about 2 days, at least about 3 days, at least about 4 days, at least about 5 days, at least about 6 days, at least about 7 days, at least about 8 days, or at least about 9 days, when assayed in an in vitro assay under comparable conditions.

[0619] Embodiment I-116. The SIRV of any one of embodiments I-101 to I-113, wherein cleavage of the self-inactivating segments in a cell transduced or transfected with the SIRV by the RNP has a k_{cleave} rate that is at least about 2-fold, at least about 4-fold, at least about 5-fold, at least about 6-fold, at least about 7-fold, at least about 8-fold, at least about 9-fold, or at least about 10-fold less than the k_{cleave} rate of the target nucleic acid in an in vitro cell-based assay, when assayed under comparable conditions.

[0620] Embodiment I-117. The SIRV of any one of embodiments I-94 to I-116, wherein the Class 2 CRISPR protein further comprises one or more nuclear localization signals (NLS).

[0621] Embodiment I-118. The SIRV of embodiment I-117, wherein the one or more NLS are expressed at or near the C-terminus of the CRISPR protein.

[0622] Embodiment I-119. The SIRV of embodiment I-117, wherein the one or more NLS are expressed at or near the N-terminus of the CRISPR protein.

[0623] Embodiment I-120. The SIRV of embodiment I-117, comprising one or more NLS located at or near the N-terminus and at or near the C-terminus of the CRISPR protein.

[0624] Embodiment I-121. The SIRV of any one of embodiments I-117 to I-120, wherein the one or more NLS are selected from the group of sequences consisting of PKKKRKV (SEQ ID NO: 344), KRPAATKKAGQAKKKK (SEQ ID NO: 345), PAAKRVKLD (SEQ ID NO: 346), RQRRNELKRSP (SEQ ID NO: 347), NQSSNFGPMKGGNFGGRSSGPYGGGGQYFAKPRNQGGY (SEQ ID NO: 348), RMRIZFKNKGKDTAELRRRRVEVSVELRKAKKDEQILKRRNV (SEQ ID NO: 349), VSRKRPRP (SEQ ID NO: 350), PPKKARED (SEQ ID NO: 351), PQPKKKPL (SEQ ID NO:352), SALIKKKKKMAP (SEQ ID NO: 353), DRLRR (SEQ ID NO: 354), PKQKKRK (SEQ ID NO: 355), RKLKKKIKKL (SEQ ID NO: 356), REKKKFLKRR (SEQ ID NO: 357), KRKGDEVDGVDEVAKKKSKK (SEQ ID NO: 358), RKCLQAGMNLEARKTKK (SEQ ID NO: 359), PRPRKIPR (SEQ ID NO: 360), PPRKKRTVV (SEQ ID NO: 361), NLSKKKKRKREK (SEQ ID NO: 362), RRPSRPFRKP (SEQ ID NO: 363), KRPRSPSS (SEQ ID NO: 364), KRGINDRNFWRGENERKTR (SEQ ID NO: 365), PRPPKMARYDN (SEQ ID NO: 366), KRSFSKAF (SEQ ID NO: 367), KLKIKRPVK (SEQ ID NO: 368), PKTRRRPRRSQRKRPPT (SEQ ID NO: 370), SRRRKANPTKLSENAKKLAKEVEN (SEQ ID NO: 371), KTRRRPRRSQRKRPPT (SEQ ID NO: 372), RRKKRRPRRKKRR (SEQ ID NO: 373), PKKKSRKPKKKSRK (SEQ ID NO: 374), HKKKHPDASVNFSEFSK (SEQ ID NO: 375), QRPGPYDRPQRPGPYDRP (SEQ ID NO: 376), LSPSLSPLLSPSLSPL (SEQ ID NO: 377), RGKGGKGLGKGGAKRHRK (SEQ ID NO: 378), PKRGRGRPKRGRGR (SEQ ID NO: 379), MSRRRKANPTKLSENAKKLAKEVEN (SEQ ID NO: 598), PKKKRKVPPPPAAKRVKLD (SEQ ID NO: 380), PKKKRKVPPPPKKKRKV (SEQ ID NO: 381), PAKRARRGYKC (SEQ ID NO: 382); KLGPRKATGRW (SEQ ID NO: 383), PRRKREE (SEQ ID NO: 384), PLRKRPRR (SEQ ID NO: 386), PLRKRPRRGSPLRKRPRR (SEQ ID NO: 387), PAAKRVKLDGGKRTADGSEFESPKKKRKV (SEQ ID NO: 388), PAAKRVKLDGGKRTADGSEFESPKKKRKVGIHGVPAA (SEQ ID NO: 389), PAAKRVKLDGGKRTADGSEFESPKKKRKVAEAAAKEAAAKEAAAKA (SEQ ID NO: 390), PAAKRVKLDGGKRTADGSEFESPKKKRKVPG (SEQ ID NO: 391), KRKGSPERGERKRHW (SEQ ID NO: 392), KRTADSQHSTPPKTKRKVEFEPKKKRKV (SEQ ID NO: 393), PKKKRKVGGSKRTADSQHSTPPKTKRKVEFEPKKKRKV (SEQ ID NO: 394), MAPKKKRKVSR (SEQ ID NO: 771), and MAPKKKRKVGGSPKKKRKVGGSPKKKRKVGGSPKKKRKVSR (SEQ ID NO: 772) wherein the one or more NLS are linked to the CRISPR protein or to adjacent NLS with a linker peptide wherein the linker peptide is selected from the group consisting of RS, (G)n (SEQ ID NO: 395), (GS)n (SEQ ID NO: 396), (GSGGS)n (SEQ ID NO: 397), (GGSGGS)n (SEQ ID NO: 398), (GGGS)n (SEQ ID NO: 399), GGSG (SEQ ID NO: 400), GGSGG (SEQ ID NO: 401), GSGSG (SEQ ID NO: 402), GSGGG (SEQ ID NO: 403), GGGSG (SEQ ID NO: 404), GSSSG (SEQ ID NO:405), GPGP (SEQ ID NO: 406), GGP, PPP, PPAPPA (SEQ ID NO: 407), PPPG (SEQ ID NO: 408), PPPGPPP (SEQ ID NO: 409), PPP(GGGS)n (SEQ ID NO: 410), (GGGS)nPPP (SEQ ID NO: 411), AEAAAKEAAAKEAAAKA (SEQ ID NO: 412), wherein the one or more NLS are linked to the CRISPR protein or to adjacent NLS with a linker peptide wherein the linker peptide is selected from the group consisting of (G)n (SEQ ID NO: 395), (GS)n (SEQ ID NO: 396), (GSGGS)n (SEQ ID NO: 397), (GGSGGS)n (SEQ ID NO: 398), (GGGS)n (SEQ ID NO: 399), GGSG (SEQ ID NO: 400), GGSGG (SEQ ID NO: 401), GSGSG (SEQ ID NO: 402), GSGGG (SEQ ID NO: 403), GGGSG (SEQ ID NO: 404), GSSSG (SEQ ID NO:405), GPGP (SEQ ID NO: 406), GGP, PPP, PPAPPA (SEQ ID NO: 407), PPPG (SEQ ID NO: 408), PPPGPPP (SEQ ID NO: 409), PPP(GGGS)n (SEQ ID NO: 410), (GGGS)nPPP (SEQ ID NO: 411), AEAAAKEAAAKEAAAKA (SEQ ID NO: 412), and TPPKTKRKVEFE (SEQ ID NO: 413), where n is 1 to 5.

[0625] Embodiment I-122. The SIRV of any one of embodiments I-117 to I-120, wherein the one or more encoded NLS are selected from the group consisting of SEQ ID NOS: 538-597, 599-610, 613, 771-772, 844-846, and 2498-2591 or a sequence having at least 85%, at least 90%, at least 95%, at least 95%, at least 96%, at least 97%, at least 98% identity thereto.

[0626] Embodiment I-123. The SIRV of any one of embodiments I-117 to I-120, wherein the one or more encoded NLS are selected from the group consisting of SEQ ID NOS: 538-597, 599-610, 613, 771-772, 844-846, and 2498-2591.

[0627] Embodiment I-124. The SIRV of any one of embodiments I-94 to I-123, wherein the CRISPR protein is a CasX protein selected from the group of sequences of SEQ ID NOs: 1-3, 49-321 and 2356-2488, or a sequence having at least about 70%, at least about 80%, at least about 90%, or at least about 95%, or at least about 95%, or at least about 96%, or at least about 97%, or at least about 98%, or at least about 99% sequence identity thereto.

[0628] Embodiment I-125. The SIRV of any one of embodiments I-94 to I-123, wherein the CRISPR protein is a CasX protein selected from the group of sequences of SEQ ID NOs: 1-3, 49-321 and 2356-2488.

[0629] Embodiment I-126. The SIRV of any one of embodiments I-94 to I-124, wherein the Class 2 CRISPR protein is a CasX protein comprising the sequence of SEQ ID NO: 138, or a sequence having at least about 70%, at least about 80%, at least about 80%, at least about 85%, at least about 90%, or at least about 95%, or at least about 95%, or at least about 96%, or at least about 97%, or at least about 98%, or at least about 99% sequence identity thereto.

[0630] Embodiment I-127. The SIRV of any one of embodiments I-94 to I-125, wherein the first gRNA has a scaffold comprising a sequence selected from the group of sequences of SEQ ID NOS: 2101-2331 and 3992-3995, or a sequence having at least about 70%, at least about 80%, at least about 90%, at least about 95%, at least about 96%, at least about 97%, at least about 98%, at least about 99%, or 100% sequence identity thereto.

[0631] Embodiment I-128. The SIRV of any one of embodiments I-94 to I-125, wherein the first gRNA has a scaffold comprising a sequence selected from the group of sequences of SEQ ID NOS: 2101-2331 and 3992-3995.

[0632] Embodiment I-129. The SIRV of any one of embodiments I-94 to I-128, wherein the second gRNA has a scaffold comprising a sequence selected from the group of sequences of SEQ ID NOS: 2101-2331 and 3992-3995, or a sequence having at least about 70%, at least about 80%, at least about 90%, at least about 95%, at least about 96%, at least about 97%, at least about 98%, at least about 99%, or 100% sequence identity thereto.

[0633] Embodiment I-130. The SIRV of any one of embodiments I-94 to I-128, wherein the second gRNA has a scaffold comprising a sequence selected from the group consisting of sequences SEQ ID NOS: 2101-2331 and 3992-3995.

[0634] Embodiment I-131. The SIRV of any one of embodiments I-94 to I-130, wherein the second guide comprises a sequence selected from the group consisting of SEQ ID NO: 2101-2238 and the first guide comprises a sequence selected from the group consisting of SEQ ID NOS: 2276-2296.

[0635] Embodiment I-132. The SIRV of embodiment I-131, wherein the second guide comprises the sequence of SEQ ID NO: 2238 and the first guide comprises the sequence of SEQ ID NO: 2296.

[0636] Embodiment I-133. The SIRV of any one of embodiments I-94 to I-132, wherein the first and second gRNA each comprise a targeting sequence having 15 nucleotides, 16 nucleotides, 17, nucleotides, 18 nucleotides, 19 nucleotides, or 20 nucleotides.

[0637] Embodiment I-134. The SIRV of any one of embodiments I-94 to I-133, wherein upon expression in a transduced or transfected cell, the CasX protein is capable of forming a ribonuclear protein complex (RNP) with the first gRNA and the second gRNA upon expression in the transduced or transfected cell.

[0638] Embodiment I-135. The SIRV of embodiment I-134, wherein the RNP comprising the first gRNA exhibits, upon binding to the target nucleic acid sequence in an in vitro editing assay, an improved characteristic as compared to an RNP comprising the second gRNA upon binding to its respective target nucleic acid sequence.

[0639] Embodiment I-136. The SIRV of embodiment I-135, wherein the improved characteristic is selected from the group consisting of increased percentage of cleavage-competent conformation, increased cleavage rate, and increased initial cleavage velocity.

[0640] Embodiment I-137. The SIRV of any one of embodiments I-94 to I-136, further comprising at least one accessory element sequence.

[0641] Embodiment I-138. The SIRV of embodiment I-137, wherein the accessory element is selected from the group consisting of a poly(A) signal, a gene enhancer element, an intron, a posttranscriptional regulatory element (PTRE), a deaminase, a DNA glycosylase inhibitor, a promoter, a stimulator of CRISPR-mediated homology-directed repair, an activator or repressor of transcription, and a self-cleaving sequence.

[0642] Embodiment I-139. The SIRV of embodiment I-138, wherein the PTRE is selected from the group consisting of cytomegalovirus immediate/early intronA, hepatitis B virus PRE (HPRE), Woodchuck Hepatitis virus PRE (WPRE), and 5′ untranslated segment (UTR) of human heat shock protein 70 mRNA (Hsp70).

[0643] Embodiment I-140. The SIRV of any one of embodiments I-137 to I-139, wherein the accessory element(s) enhance the expression, binding, activity, or performance of the CRISPR protein in the cell as compared to the CRISPR protein in the absence of said accessory element.

[0644] Embodiment I-141. The SIRV of embodiment I-140, wherein the enhancement is an increase in editing of the target nucleic acid in a timed in vitro assay of at least about 10%, at least about 20%, at least about 30%, at least about 40%, at least about 50%, at least about 60%, at least about 70%, at least about 80%, at least about 90%, at least about 100%, at least about 150%, at least about 200%, or at least about 300%.

[0645] Embodiment I-142. The SIRV of any one of embodiments I-94 to I-141, wherein the packaging element is selected from the group consisting of AAV 5′ and 3′ inverted terminal repeats (ITR), adenovirus packaging protein, lentiviral psi packaging element, and gammaretroviral psi packaging element.

[0646] Embodiment I-143. The SIRV of embodiment I-142, wherein the AAV 5′ and 3′ ITRs are derived from serotype AAV1, AAV2, AAV3, AAV4, AAV5, AAV6, AAV7, AAV8, AAV9, AAV10, AAV11, AAV12, AAV 44.9, AAV 9.45, AAV 9.61, AAV-Rh74, or AAVRh10.

[0647] Embodiment I-144. The SIRV of embodiment I-143, wherein the ITRs are derived from serotype AAV2.

[0648] Embodiment I-145. The SIRV of any one of embodiments I-1 to I-144, wherein the polynucleotide comprises a sequence selected from the group consisting of SEQ ID NOs 4151-4156, or a sequence having at least about 70%, at least about 80%, at least about 80%, at least about 85%, at least about 90%, or at least about 95%, or at least about 95%, or at least about 96%, or at least about 97%, or at least about 98%, or at least about 99% sequence identity thereto.

[0649] Embodiment I-146. The SIRV of any one of embodiments I-1 to I-144, wherein the polynucleotide comprises or encodes one or more components in which the sequence comprises less than about 10%, less than about 5%, or less than about 1% CpG dinucleotides.

[0650] Embodiment I-147. The SIRV of embodiment I-146, wherein the components are selected from the group consisting of 5′ ITR, 3′ ITR, Pol III promoter, Pol II promoter, encoding sequence for CRISPR nuclease, encoding sequence for gRNA, accessory element, and poly(A) signal.

[0651] Embodiment I-148. A self-inactivating viral-derived particle comprising
[0652] a) a viral capsid; and
[0653] b) the SIRV of any one of embodiments I-1 to I-147.

[0654] Embodiment I-149. The self-inactivating viral-derived particle of embodiment I-148, wherein the viral capsid is derived from an adeno associated virus (AAV), an adenovirus, a lentivirus, or a gammaretrovirus.

[0655] Embodiment I-150. The self-inactivating viral-derived particle of embodiment I-149, wherein the capsid is derived from an AAV serotype selected from the group consisting of AAV1, AAV2, AAV3, AAV4, AAV5, AAV6, AAV7, AAV8, AAV9, AAV10, AAV11, AAV12, AAV 44.9, AAV 9.45, AAV 9.61, AAV-Rh74, AAVRh10, and chimeras thereof.

[0656] Embodiment I-151. The self-inactivating viral-derived particle of embodiment I-150, wherein the SIRV packaging component is 5′ and 3′ AAV ITR selected from the same serotype as the AAV capsid.

[0657] Embodiment I-152. The self-inactivating viral-derived particle of embodiment I-150, wherein the SIRV packaging component is 5′ and 3′ AAV ITR selected from a different serotype as the AAV capsid.

[0658] Embodiment I-153. The self-inactivating viral-derived particle of embodiment I-150, wherein the SIRV packaging component is 5′ and 3′ AAV ITR selected from serotype AAV2.

[0659] Embodiment I-154. A pharmaceutical composition, comprising the self-inactivating viral-derived particle of any one of embodiments I-148 to I-153, and a pharmaceutically acceptable carrier, diluent or excipient.

[0660] Embodiment I-155. A method of modifying a target nucleic acid in a cell, comprising transfecting the cell with the SIRV of any one of embodiments I-1 to I-147, wherein the target nucleic acid is modified by an RNP of the expressed Class 2 CRISPR protein and the first gRNA.

[0661] Embodiment I-156. The method of embodiment I-155, wherein the modifying comprises introducing a single-stranded break in the target nucleic acid sequence of the cell.

[0662] Embodiment I-157. The method of embodiment I-155, wherein the modifying comprises introducing a double-stranded break in the target nucleic acid sequence of the cell.

[0663] Embodiment I-158. The method of any one of embodiments I-155 to I-157, wherein the self-inactivating segment is cleaved by an RNP of the Class 2 CRISPR protein and the first gRNA subsequent to the modifying of the target nucleic acid of the cell.

[0664] Embodiment I-159. The method of any one of embodiments I-155 to I-157, wherein the self-inactivating segment is cleaved by an RNP of the Class 2 CRISPR protein and the second gRNA subsequent to the modifying of the target nucleic acid.

[0665] Embodiment I-160. The method of embodiment I-158 or I-159, wherein the self-inactivating segment is cleaved at least 1 day, at least 2 days, at least 3 days, at least 4 days, at least 5 days, at least 6 days, or at least 7 days after the modifying of the target nucleic acid.

[0666] Embodiment I-161. The method of any one of embodiments I-155 to I-159, wherein the cleavage of the self-inactivating segment results in reduced off-target modifying of nucleic acid in the cell compared to a cell transduced with an SIRV not comprising the self-inactivating segments.

[0667] Embodiment I-162. The method of any one of embodiments I-155 to I-159, wherein the cleavage of the self-inactivating segment results in reduced or eliminated expression of the Class 2 CRISPR protein in the cell.

[0668] Embodiment I-163. A method of modifying a target nucleic acid in a population of cells of a subject, comprising administering a therapeutic dose of the self-inactivating viral-derived particle of any one of embodiments I-148 to I-153 to the subject, wherein the target nucleic acid of the cells transduced is modified by an RNP of the Class 2 CRISPR protein and the gRNA expressed in the cells.

[0669] Embodiment I-164. The method of embodiment I-163, wherein the self-inactivating viral-derived particle is administered to the subject at a dose of at least about 1×10⁵ vector genomes/kg (vg/kg), at least about 1×10⁶ vg/kg, at least about 1×10⁷ vg/kg, at least about 1×10⁸ vg/kg, at least about 1×10⁹ vg/kg, at least about 1×10¹⁰ vg/kg, at least about 1×10¹¹ vg/kg, at least about 1×10¹² vg/kg, at least about 1×10¹³ vg/kg, at least about 1×10¹⁴ vg/kg, at least about 1×10¹⁵ vg/kg, or at least about 1×10¹⁶ vg/kg.

[0670] Embodiment I-165. The method of embodiment I-163, wherein the self-inactivating viral-derived particle is administered to the subject at a dose of at least about 1×10⁵ vg/kg to about 1×10¹⁶ vg/kg, at least about 1×10⁶ vg/kg to about 1×10¹⁵ vg/kg, or at least about 1×10⁷ vg/kg to about 1×10¹⁴ vg/kg.

[0671] Embodiment I-166. The method of any one of embodiments I-163 to I-165, wherein the subject is selected from the group consisting of rodent, mouse, rat, and non-human primate.

[0672] Embodiment I-167. The method of any one of embodiments I-163 to I-165, wherein the subject is a human.

[0673] Embodiment I-168. The method of any one of embodiments I-163 to I-167, wherein the self-inactivating viral-derived particle is administered to the subject according to a treatment regimen comprising one or more consecutive doses using a therapeutically effective dose of the self-inactivating viral derived particle.

[0674] Embodiment I-169. The method of any one of embodiments I-163 to I-168, wherein the therapeutically effective dose is administered to the subject as two or more doses over a period of at least two weeks, or at least one month, or at least two months, or at least three months, or at least four months, or at least five months, or at least six months, or once a year, or every 2 or 3 years.

[0675] Embodiment I-170. The method of any one of embodiments I-163 to I-169, wherein the therapeutically effective dose is administered by a route of administration selected from the group consisting of subcutaneous, intradermal, intraneural, intranodal, intramedullary, intramuscular, intravenous, intracerebroventricular, intracisternal, intrathecal, intracranial, intralumbar, intratracheal, intraosseous, inhalatory, intracontralateral striatum, intraocular, intravitreal, intralymphatical, intraperitoneal routes and sub-retinal routes, wherein the administering method is injection, transfusion, or implantation.

[0676] Embodiment I-171. The method of any one of embodiments I-163 to I-170, wherein the modifying comprises introducing a single-stranded break in the target nucleic acid sequence of the cells of the subject.

[0677] Embodiment I-172. The method of any one of embodiments I-163 to I-170, wherein the modifying comprises introducing a double-stranded break in the target nucleic acid sequence of the cells of the subject.

[0678] Embodiment I-173. The method of embodiment I-171 or I-172, wherein the modifying results in an insertion, deletion, or mutation in the target nucleic acid sequence of the cells of the subject.

[0679] Embodiment I-174. The method of any one of embodiments I-163 to I-173, wherein the self-inactivating segment is cleaved by an RNP of the Class 2 CRISPR protein and the first gRNA subsequent to the modifying of the target nucleic acid of the cells of the subject.

[0680] Embodiment I-175. The method of any one of embodiments I-163 to I-173, wherein the self-inactivating segment is cleaved by an RNP of the Class 2 CRISPR protein and the second gRNA subsequent to the modifying of the target nucleic acid of the cells of the subject.

[0681] Embodiment I-176. The method of embodiment I-174 or I-175, wherein the self-inactivating segment is cleaved at least 1 day, at least 2 days, at least 3 days, at least 4 days, at least 5 days, at least 6 days, at least 7 days, at least 8 days, or at least 9 days after the modifying of the target nucleic acid of the cells of the subject.

[0682] Embodiment I-177. The method of any one of embodiments I-174 to I-176, wherein the cleavage of the self-inactivating segment results in reduced or eliminated expression of the Class 2 CRISPR protein in the cell of the cells of the subject.

[0683] Embodiment I-178. The method of any one of embodiments I-174 to I-177, wherein the cleavage of the self-inactivating segment results in reduced off-target modifying of nucleic acid in the cells compared to cells transduced with an AAV not comprising the self-inactivating segments.

[0684] Embodiment I-179. A composition comprising:
[0685] a) an AAV expression cassette; and
[0686] b) a polynucleotide comprising sequences encoding one or more small hairpin RNA (shRNA) sequences, each operably linked to a promoter.

[0687] Embodiment I-180. The composition of embodiment I-179, wherein the AAV expression cassette comprises
[0688] a) a first adeno-associated virus (AAV) inverted terminal repeat (ITR) sequence;
[0689] b) a second AAV ITR sequence;
[0690] c) a sequence encoding a Class 2 CRISPR protein having a single RNA-guided RuvC domain;
[0691] d) a first promoter operably linked to the sequence encoding the Class 2 CRISPR protein;
[0692] e) a sequence encoding a first guide RNA (gRNA) comprising a scaffold sequence and a linked targeting sequence that is complementary to and capable of hybridizing with a target nucleic acid of a cell to be modified; and
[0693] f) a second promoter sequence operably linked to the sequence encoding the first gRNA.

[0694] Embodiment I-181. The composition of embodiment I-179 or I-180, wherein the polynucleotide comprises an encoding sequence for a single shRNA and linked promoter.

[0695] Embodiment I-182. The composition of embodiment I-179 or I-180, wherein the polynucleotide comprises an encoding sequence for two shRNA and linked promoters.

[0696] Embodiment I-183. The composition of embodiment I-179 or I-180, wherein the polynucleotide comprises an encoding sequence for three shRNA and linked promoters.

[0697] Embodiment I-184. The composition of any one of embodiments I-179 to I-183, wherein the shRNA encoding sequence comprises a sequence selected from the group consisting of SEQ ID NOS: 2640-2687, or a sequence having at least 85%, at least 90%, at least 95%, at least 95%, at least 96%, at least 97%, at least 98% identity thereto.

[0698] Embodiment I-185. The composition of any one of embodiments I-179 to I-183, wherein the shRNA encoding sequence comprises a sequence selected from the group consisting of SEQ ID NOS: 2640-2687.

[0699] Embodiment I-186. The composition of any one of embodiments I-179 to I-185, wherein the polynucleotide comprising the shRNA and linked promoters are linked exterior to the AAV transgene inserted into a bacterial plasmid backbone.

[0700] Embodiment I-187. The composition of any one of embodiments I-179 to I-185, wherein the polynucleotide comprising the shRNA and linked promoters are inserted into
[0701] a) an AAV RepCap plasmid;
[0702] b) an AAV Helper plasmid; and/or
[0703] c) a separate vector.

[0704] Embodiment I-188. The composition of any one of embodiments I-180 to I-187, wherein the encoded Class 2, CRISPR protein is a CasX.

[0705] Embodiment I-189. The composition of embodiment I-188, wherein the encoded CasX comprises a sequence selected from the group consisting of SEQ ID NOS: 1-3, 49-321 and 2356-2488, or a sequence having at least 85%, at least 90%, at least 95%, at least 95%, at least 96%, at least 97%, at least 98%, or at least 99% identity thereto.

[0706] Embodiment I-190. The composition of embodiment I-188, wherein the encoded CasX comprises a sequence selected from the group consisting of the sequences of SEQ ID NOS: 1-3, 49-321 and 2356-2488.

[0707] Embodiment I-191. The composition of embodiment I-188, wherein the encoded Class 2 CRISPR protein is a CasX protein comprising the sequence of SEQ ID NO: 138, or a sequence having at least about 70%, at least about 80%, at least about 80%, at least about 85%, at least about 90%, or at least about 95%, or at least about 95%, or at least about 96%, or at least about 97%, or at least about 98%, or at least about 99% sequence identity thereto.

[0708] Embodiment I-192. The composition of any one of embodiments I-180 to I-191, wherein the gRNA has a scaffold comprising a sequence selected from the group of sequences consisting of SEQ ID NOS: 2101-2331 and 3992-3995, or a sequence having at least about 70%, at least about 80%, at least about 80%, at least about 85%, at least about 90%, or at least about 95%, or at least about 95%, or at least about 96%, or at least about 97%, or at least about 98%, or at least about 99% sequence identity thereto.

[0709] Embodiment I-193. The composition of any one of embodiments I-188 to I-192, wherein the CasX and gRNA encoding sequences are capable of being transcribed in a packaging cell transfected with the AAV expression cassette.

[0710] Embodiment I-194. The composition of embodiment I-192, wherein the AAV expression cassette for transfection is encapsulated in a lipid nanoparticle (LNP).

[0711] Embodiment I-195. The composition of embodiment I-191 or I-194, wherein the shRNA is capable of being expressed and processed in a packaging cell transfected with the polynucleotide into a siRNA sequence complementary to and capable of hybridizing with an mRNA of the CasX transcribed by the packaging cell.

[0712] Embodiment I-196. The composition of any one of embodiments I-192 to I-195, wherein the packaging cell is selected from the group consisting of baby hamster kidney (BHK), human embryonic kidney 293 (HEK293), HEK293T, NS0, SP2/0, YO myeloma cells, A549, P3X63 mouse myeloma cells, PER, PER.C6, NIH3T3, COS, HeLa, and Chinese hamster ovary (CHO).

[0713] Embodiment I-197. The composition of embodiment I-194 or I-196, wherein upon hybridization of the siRNA sequence to the mRNA of the CasX, the CasX mRNA is degraded such that expression of the CasX protein is reduced or eliminated in the packaging cell.

[0714] Embodiment I-198. The composition of embodiment I-197, wherein expression of the CasX protein is reduced by at least 40%, at least 50%, at least 60%, at least 70%, at least 80%, or at least 90% compared to a transfected packaging cell not comprising the shRNA, when assayed in a timed in vitro assay under comparable conditions.

[0715] Embodiment I-199. The composition of any one of embodiments I-180 to I-198, wherein the first gRNA comprises a sequence selected from the group of sequences consisting of SEQ ID NOS: 2101-2331 and 3992-3995, or a sequence having at least 85%, at least 90%, at least 95%, at least 95%, at least 96%, at least 97%, at least 98% identity thereto.

[0716] Embodiment I-200. The composition of any one of embodiments I-180 to I-198, wherein the first gRNA comprises a sequence selected from the group of sequences consisting of SEQ ID NOS: 2101-2331 and 3992-3995.

[0717] Embodiment I-201. The composition of any one of embodiments I-180 to I-198, wherein the first gRNA has a scaffold comprising the sequence of SEQ ID NO: 2296, or a sequence having at least about 70%, at least about 80%, at least about 80%, at least about 85%, at least about 90%, or at least about 95%, or at least about 95%, or at least about 96%, or at least about 97%, or at least about 98%, or at least about 99% sequence identity thereto.

[0718] Embodiment I-202. The composition of any one of embodiments I-180 to I-201, wherein the first gRNA comprises a targeting sequence complementary to a target nucleic acid sequence in a cell, wherein the targeting sequence has at least 15, at least 16, at least 17, at least 18, at least 19, at least 20, or at least 21 nucleotides.

[0719] Embodiment I-203. The composition of any one of embodiments I-180 to I-202, wherein the AAV expression cassette comprises
[0720] a) one or more self-inactivating segments comprising a protospacer adjacent motif (PAM) sequence and a polynucleotide sequence capable of being bound and cleaved by a ribonuclear protein complex (RNP) of the Class 2 CRISPR protein and a second gRNA;
[0721] b) a sequence encoding a second gRNA comprising a targeting sequence complementary to the self-inactivating segment; and
[0722] c) a third promoter operably linked to the second gRNA.

[0723] Embodiment I-204. The composition of embodiment I-203, wherein the one or more self-inactivating segments of the polynucleotide are located:
[0724] a) 5′ or 3′ adjacent to or within the sequence encoding the Class 2 CRISPR protein;
[0725] b) 5′ or 3′ adjacent to or within a Kozak sequence located between the first promoter and the sequence encoding the Class 2 CRISPR protein;
[0726] c) 5′ or 3′ adjacent to or within to the first promoter sequence;
[0727] d) 5′ or 3′ adjacent to or within the second promoter sequence;
[0728] e) 5′ or 3′ adjacent to or within the third promoter sequence;
[0729] f) downstream of the transcriptional start site for the sequence encoding the Class 2 CRISPR protein;
[0730] g) within one or more inserted introns in the polynucleotide encoding the Class 2 CRISPR protein;
[0731] h) at the 3′ end of the polynucleotide encoding the Class 2 CRISPR protein, between a stop codon and poly(A) termination site of the sequence encoding the Class 2 CRISPR protein; or
[0732] i) any combination of (a)-(h).

[0733] Embodiment I-205. The composition of embodiment I-203 or I-204, wherein the self-inactivating segment comprises a 15-21 nucleotide sequence complementary to the targeting sequence of the second gRNA that is 3′ adjacent to a PAM sequence recognized by an RNP of the Class 2 CRISPR protein and the second gRNA.

[0734] Embodiment I-206. The composition of any one of embodiments I-203 to I-205, wherein cleavage of the self-inactivating segments in a cell transfected with the composition by the RNP of the Class 2 CRISPR protein and the second gRNA results in reduced or eliminated expression of the Class 2 CRISPR protein or the gRNA encoded by the polynucleotide.

[0735] Embodiment I-207. The composition of any one of embodiments I-203 to I-206, wherein the PAM sequence of the one or more self-inactivating segments promotes less efficient cleavage or rate of cleavage of the self-inactivating segment by the RNP of the Class 2 CRISPR protein and the second gRNA compared to the PAM sequence 5′ and adjacent to the target nucleic acid of the cell to be modified.

[0736] Embodiment I-208. A method for reducing premature cleavage of an self-inactivating AAV (siAAV) transgene encoding a Class 2 CRISPR nuclease protein and one or more gRNAs in a packaging cell, comprising introducing a polynucleotide sequence encoding one or more small hairpin RNA (shRNA) into the packaging cell comprising the siAAV transgene, wherein the shRNA is capable of being expressed and processed into an siRNA sequence, and wherein the siRNA sequence is complementary to an mRNA of the Class 2 CRISPR nuclease transcribed by the packaging cell.

[0737] Embodiment I-209. The method of embodiment I-208, wherein the packaging cell is transfected with the siAAV transgene.

[0738] Embodiment I-210. The method of embodiment I-208 or I-209, wherein the transgene comprises
[0739] a) a first adeno-associated virus (AAV) inverted terminal repeat (ITR) sequence;
[0740] b) a second AAV ITR sequence;
[0741] c) a sequence encoding a Class 2 CRISPR protein having a single RNA-guided RuvC domain;
[0742] d) a first promoter operably linked to the sequence encoding the Class 2 CRISPR protein;
[0743] e) a sequence encoding a first guide RNA (gRNA) comprising a targeting sequence that is complementary to and capable of hybridizing with a target nucleic acid of a cell to be modified; and
[0744] f) a second promoter sequence operably linked to the sequence encoding the first gRNA
[0745] g) a sequence encoding a second guide RNA (gRNA) comprising a scaffold sequence and a linked targeting sequence complementary to one or more self-inactivating segments of the transgene;
[0746] h) a third promoter sequence operably linked to the sequence encoding the second gRNA, wherein the third promoter has a sequence different from the sequence of the second promoter; and
[0747] i) one or more self-inactivating segments of the polynucleotide comprising a protospacer adjacent motif (PAM) sequence and a polynucleotide sequence capable of being bound and cleaved by a ribonuclear protein complex (RNP) of the Class 2 CRISPR protein and the second gRNA.

[0748] Embodiment I-211. The method of any one of embodiments I-208 to I-210, wherein the polynucleotide comprises an encoding sequence for a single shRNA and linked promoter.

[0749] Embodiment I-212. The method of any one of embodiments I-208 to I-210, wherein the polynucleotide comprises an encoding sequence for two shRNA and linked promoters.

[0750] Embodiment I-213. The method of any one of embodiments I-208 to I-210, wherein the polynucleotide comprises an encoding sequence for three shRNA and linked promoters.

[0751] Embodiment I-214. The method of any one of embodiments I-208 to I-213, wherein the shRNA encoding sequence comprises a sequence selected from the group consisting of SEQ ID NOS: 2640-2687, or a sequence having at least 85%, at least 90%, at least 95%, at least 95%, at least 96%, at least 97%, at least 98% identity thereto.

[0752] Embodiment I-215. The method of any one of embodiments I-208 to I-213, wherein the shRNA encoding sequence comprises a sequence selected from the group consisting of SEQ ID NOS: 2640-2687.

[0753] Embodiment I-216. The method of any one of embodiments I-210 to I-215, wherein the polynucleotide comprising the shRNA and linked promoters are linked exterior to the AAV transgene inserted into a bacterial plasmid backbone.

[0754] Embodiment I-217. The method of any one of embodiments I-210 to I-215, wherein the polynucleotide comprising the shRNA and linked promoters are inserted into;
[0755] a) an AAV RepCap plasmid;
[0756] b) an AAV Helper plasmid; and/or
[0757] c) a separate vector.

[0758] Embodiment I-218. The method of any one of embodiments I-208 to I-217, wherein the packaging cell is selected from the group consisting of BHK, HEK293, HEK293T, NS0, SP2/0, YO myeloma cells, A549, P3X63 mouse myeloma cells, PER, PER.C6, NIH3T3, COS, HeLa, and CHO.

[0759] Embodiment I-219. The method of any one of embodiments I-208 to I-218, wherein upon transcription of the shRNA and Class 2 Type V CRISPR nuclease sequences, the shRNA is processed into siRNA which hybridizes with the mRNA of the Class 2 CRISPR nuclease and is degraded by the packaging cell.

[0760] Embodiment I-220. The method of embodiment I-219, wherein expression of the Class 2 CRISPR nuclease protein in the packaging cell is repressed by at least 40%, at least 50%, at least 60%, at least 70%, at least 80%, or at least 90% compared to a transfected packaging cell not comprising the shRNA sequence, when assayed in a timed in vitro assay under comparable conditions.

[0761] Embodiment I-221. The method of any one of embodiments I-208 to I-220, wherein the Class 2 CRISPR nuclease protein is a CasX.

[0762] Embodiment I-222. The method of embodiment I-221, wherein the encoded CasX comprises a sequence selected from the group consisting of SEQ ID NOS: 1-3, 49-321 and 2356-2488, or a sequence having at least 85%, at least 90%, at least 95%, at least 95%, at least 96%, at least 97%, at least 98%, or at least 99% identity thereto.

[0763] Embodiment I-223. The method of embodiment I-221, wherein the encoded CasX comprises a sequence selected from the group consisting of the sequences of SEQ ID NOS: 1-3, 49-321 and 2356-2488.

[0764] Embodiment I-224. The method of embodiment I-221, wherein the encoded CasX comprises the sequence of SEQ ID NO: 138, or a sequence having at least about 70%, at least about 80%, at least about 80%, at least about 85%, at least about 90%, or at least about 95%, or at least about 95%, or at least about 96%, or at least about 97%, or at least about 98%, or at least about 99% sequence identity thereto.

[0765] Embodiment I-225. The method of any one of embodiments I-208 to I-218, wherein upon transcription of the shRNA and gRNA sequences, shRNA is processed by the packaging cell into siRNA capable of hybridizing with the gRNA.

[0766] Embodiment I-226. The method of embodiment I-225, wherein the processed siRNA hybridizes with the gRNA and the gRNA is degraded by the packaging cell.

[0767] Embodiment I-227. The method of embodiment I-226, wherein the amount of gRNA in the packaging cell is reduced by at least 40%, at least 50%, at least 60%, at least 70%, at least 80%, or at least 90% compared to a transfected packaging cell not comprising the shRNA sequence, when assayed in a timed in vitro assay under comparable conditions.

[0768] Embodiment I-228. The method of any one of embodiments I-210 to I-227, wherein the first gRNA has a scaffold comprising a sequence selected from the group of sequences of SEQ ID NOS: 2101-2331 and 3992-3995, or a sequence having at least about 70%, at least about 80%, at least about 90%, at least about 95%, at least about 96%, at least about 97%, at least about 98%, at least about 99%, or 100% sequence identity thereto.

[0769] Embodiment I-229. The method of any one of embodiments I-210 to I--227, wherein the first gRNA has a scaffold comprising a sequence selected from the group of sequences of SEQ ID NOS: 2101-2331 and 3992-3995.

[0770] Embodiment I-230. The method of any one of embodiments I-210 to I-229, wherein the second gRNA has a scaffold comprising a sequence selected from the group of sequences of SEQ ID NOS: 2101-2331 and 3992-3995, or a sequence having at least about 70%, at least about 80%, at least about 90%, at least about 95%, at least about 96%, at least about 97%, at least about 98%, at least about 99% sequence identity thereto.

[0771] Embodiment I-231. The method of any one of embodiments I-210 to I-229, wherein the second gRNA has a scaffold comprising a sequence selected from the group consisting of sequences SEQ ID NOS: 2101-2331 and 3992-3995.

[0772] Embodiment I-232. The method of any one of embodiments I-210 to I-227, wherein the second guide comprises a sequence selected from the group consisting of SEQ ID NO: 2101-2238 and the first guide comprises a sequence selected from the group consisting of SEQ ID NOS: 2276-2296.

[0773] Embodiment I-233. The method of embodiment I-232, wherein the second guide comprises the sequence of SEQ ID NO: 2238 or a sequence having at least about 70%, at least about 80%, at least about 90%, at least about 95%, at least about 96%, at least about 97%, at least about 98%, at least about 99% sequence identity thereto and the first guide comprises the sequence of SEQ ID NO: 2296 or a sequence having at least about 70%, at least about 80%, at least about 90%, at least about 95%, at least about 96%, at least about 97%, at least about 98%, at least about 99% sequence identity thereto.

[0774] Embodiment I-234. A method for reducing premature cleavage of an siAAV transgene encoding a Class 2 CRISPR nuclease protein and one or more gRNA in a packaging cell, comprising introducing a sequence encoding an interfering RNA (RNAi) into the packaging cell comprising the siAAV transgene, wherein the RNAi is capable of being expressed, and wherein the RNAi sequence is complementary to the gRNA or the mRNA encoding the Class 2 CRISPR nuclease protein transcribed by the packaging cell.

[0775] Embodiment I-235. The method of embodiment I-234, wherein the transgene comprises
[0776] a) a first adeno-associated virus (AAV) inverted terminal repeat (ITR) sequence;
[0777] b) a second AAV ITR sequence;
[0778] c) a sequence encoding a Class 2 CRISPR protein having a single RNA-guided RuvC domain;
[0779] d) a first promoter operably linked to the sequence encoding the Class 2 CRISPR protein;
[0780] e) a sequence encoding a first guide RNA (gRNA) comprising a targeting sequence that is complementary to and capable of hybridizing with a target nucleic acid of a cell to be modified; and
[0781] f) a second promoter sequence operably linked to the sequence encoding the first gRNA;
[0782] g) a sequence encoding a second guide RNA (gRNA) and a targeting sequence complementary to one or more self-inactivating segments of the transgene;
[0783] h) a third promoter sequence operably linked to the sequence encoding the second gRNA, wherein the third promoter has a sequence different from the sequence of the second promoter; and
[0784] i) one or more self-inactivating segments of the polynucleotide comprising a protospacer adjacent motif (PAM) sequence and a polynucleotide sequence capable of being bound and cleaved by a ribonuclear protein complex (RNP) of the Class 2 CRISPR protein and the second gRNA.

[0785] Embodiment I-236. The method of embodiment I-234 or I-235, wherein the sequence encoding the RNAi is operably linked to a promoter.

[0786] Embodiment I-237. The method of embodiment I-236, wherein the sequence encoding the RNAi and linked promoter is linked exterior to the sequence of the siAAV transgene in a bacterial plasmid backbone.

[0787] Embodiment I-238. The method of embodiment I-236, wherein the sequence encoding the RNAi and linked promoter is introduced into the packaging cell using a separate vector.

[0788] Embodiment I-239. The method of any one of embodiments I-234 to I-238, wherein the cell is a packaging cell selected from the group consisting of BHK, HEK293, HEK293T, NS0, SP2/0, YO myeloma cells, A549, P3X63 mouse myeloma cells, PER, PER.C6, NIH3T3, COS, HeLa, and CHO.

[0789] Embodiment I-240. The method of any one of embodiments I-234 to I-239, wherein upon transcription of the gRNA and RNAi, the RNAi hybridizes with the gRNA, interfering with the formation of an RNP of the gRNA and CRISPR nuclease.

[0790] Embodiment I-241. The method of any one of embodiments I-234 to I-240, wherein upon transcription of the RNAi, and the mRNA encoding the Class 2 CRISPR nuclease protein, the RNAi hybridizes with the mRNA, interfering with the formation of an RNP of the gRNA and the Class 2 CRISPR nuclease.

[0791] Embodiment I-242. The method of embodiment I-240 or I-241, wherein the formation of the RNP in the packaging cell is repressed by at least 40%, at least 50%, at least 60%, at least 70%, at least 80%, or at least 90% compared to a transfected packaging cell not comprising the RNAi sequence, when assayed in a timed in vitro assay under comparable conditions.

[0792] Embodiment I-243. The method of any one of embodiments I-240 to I-242, wherein the cleavage of the siAAV transgene in the packaging cell is repressed by at least 40%, at least 50%, at least 60%, at least 70%, at least 80%, or at least 90% compared to a transfected packaging cell not comprising the RNAi sequence, when assayed in a timed in vitro assay under comparable conditions.

[0793] Embodiment I-244. The method of any one of embodiments I-234 to I-243, wherein the Class 2 CRISPR nuclease protein is a CasX.

[0794] Embodiment I-245. The method of embodiment I-244, wherein the encoded CasX comprises a sequence selected from the group consisting of SEQ ID NOS: 1-3, 49-321 and 2356-2488, or a sequence having at least 85%, at least 90%, at least 95%, at least 95%, at least 96%, at least 97%, at least 98%, or at least 99% identity thereto.

[0795] Embodiment I-246. The method of embodiment I-244, wherein the encoded CasX comprises a sequence selected from the group consisting of the sequences of SEQ ID NOS: 1-3, 49-321 and 2356-2488.

[0796] Embodiment I-247. The method of embodiment I-244, wherein the encoded CasX comprises the sequence of SEQ ID NO: 138, or a sequence having at least about 70%, at least about 80%, at least about 80%, at least about 85%, at least about 90%, or at least about 95%, or at least about 95%, or at least about 96%, or at least about 97%, or at least about 98%, or at least about 99% sequence identity thereto.

[0797] Embodiment I-248. The method of any one of embodiments I-234 to I-247, wherein the first gRNA has a scaffold comprising a sequence selected from the group of sequences of SEQ ID NOS: 2101-2331, 3992-3995 and 4028, or a sequence having at least about 70%, at least about 80%, at least about 90%, at least about 95%, at least about 96%, at least about 97%, at least about 98%, at least about 99%, or 100% sequence identity thereto.

[0798] Embodiment I-249. The method of any one of embodiments I-234 to I-247, wherein the first gRNA has a scaffold comprising a sequence selected from the group of sequences of SEQ ID NOS: 2101-2331, 3992-3995 and 4028.

[0799] Embodiment I-250. The method of any one of embodiments I-234 to I-249, wherein the second gRNA has a scaffold comprising a sequence selected from the group of sequences of SEQ ID NOS: 2101-2331, 3992-3995, and 4028, or a sequence having at least about 70%, at least about 80%, at least about 90%, at least about 95%, at least about 96%, at least about 97%, at least about 98%, at least about 99%, or 100% sequence identity thereto.

[0800] Embodiment I-251. The method of any one of embodiments I-234 to I-249, wherein the second gRNA has a scaffold comprising a sequence selected from the group consisting of sequences SEQ ID NOS: 2101-2331, 3992-3995, and 4028.

[0801] Embodiment I-252. The method of any one of embodiments I-234 to I-247, wherein the second guide comprises a sequence selected from the group consisting of SEQ ID NO: 2101-2238 and the first guide comprises a sequence selected from the group consisting of SEQ ID NOS: 2276-2296.

[0802] Embodiment I-253. The method of embodiment I-252, wherein the second guide comprises the sequence of SEQ ID NO: 2238 and the first guide comprises the sequence of SEQ ID NO: 2296.

[0803] Embodiment I-254. A method for reducing premature cleavage of an siAAV transgene encoding a Class 2 CRISPR nuclease protein and one or more gRNA in a packaging cell, comprising introducing a sequence encoding an anti-sense RNA (asRNA) into the packaging cell comprising the siAAV transgene, wherein the asRNA is capable of being expressed, and wherein the asRNA sequence is complementary to the gRNA or the mRNA encoding the Class 2 CRISPR nuclease protein transcribed by the packaging cell.

[0804] Embodiment I-255. The method of embodiment I-254, wherein the transgene comprises
[0805] a) a first adeno-associated virus (AAV) inverted terminal repeat (ITR) sequence;
[0806] b) a second AAV ITR sequence;
[0807] c) a sequence encoding a Class 2 CRISPR protein having a single RNA-guided RuvC domain;
[0808] d) a first promoter operably linked to the sequence encoding the Class 2 CRISPR protein;
[0809] e) a sequence encoding a first guide RNA (gRNA) comprising a targeting sequence that is complementary to and capable of hybridizing with a target nucleic acid of a cell to be modified; and
[0810] f) a second promoter sequence operably linked to the sequence encoding the first gRNA;
[0811] g) a sequence encoding a second guide RNA (gRNA) and a targeting sequence complementary to one or more self-inactivating segments of the transgene;
[0812] h) a third promoter sequence operably linked to the sequence encoding the second gRNA, wherein the third promoter has a sequence different from the sequence of the second promoter; and
[0813] i) one or more self-inactivating segments of the polynucleotide comprising a protospacer adjacent motif (PAM) sequence and a polynucleotide sequence capable of being bound and cleaved by a ribonuclear protein complex (RNP) of the Class 2 CRISPR protein and the second gRNA.

[0814] Embodiment I-256. The method of embodiment I-254 or I-255, wherein the sequence encoding the asRNA is operably linked to a promoter.

[0815] Embodiment I-257. The method of embodiment I-256, wherein the sequence encoding the asRNA and linked promoter is linked to the 5′ end of the siAAV transgene.

[0816] Embodiment I-258. The method of embodiment I-256, wherein the sequence encoding the asRNA and linked promoter is introduced into the packaging cell using a separate vector.

[0817] Embodiment I-259. The method of any one of embodiments I-254 to I-258, wherein the cell is a packaging cell selected from the group consisting of BHK, HEK293, HEK293T, NS0, SP2/0, YO myeloma cells, A549, P3X63 mouse myeloma cells, PER, PER.C6, NIH3T3, COS, HeLa, and CHO.

[0818] Embodiment I-260. The method of any one of embodiments I-254 to I-259, wherein upon transcription of the gRNA and asRNA in the packaging cell, the asRNA hybridizes with the gRNA, interfering with the formation of an RNP of the gRNA and CRISPR nuclease.

[0819] Embodiment I-261. The method of any one of embodiments I-254 to I-259, wherein upon transcription of the mRNA of the Class 2 CRISPR nuclease protein and the asRNA, the asRNA hybridizes with the mRNA, repressing expression of the Class 2 CRISPR nuclease protein in the packaging cell.

[0820] Embodiment I-262. The method of embodiment I-260 or I-261, wherein the formation of the RNP in the packaging cell is repressed by at least 40%, at least 50%, at least 60%, at least 70%, at least 80%, or at least 90% compared to a transfected packaging cell not comprising the asRNA sequence, when assayed in a timed in vitro assay under comparable conditions.

[0821] Embodiment I-263. The method of embodiment I-260 or I-261, wherein the cleavage of the siAAV transgene in the packaging cell is repressed by at least 40%, at least 50%, at least 60%, at least 70%, at least 80%, or at least 90% compared to a transfected packaging cell not comprising the asRNA sequence, when assayed in a timed in vitro assay under comparable conditions.

[0822] Embodiment I-264. The method of embodiment I-260 or I-261, wherein the titer of the siAAV produced by the packaging cell comprising the asRNA is at least about 2-fold, at least about 3-fold, at least about 4-fold, at least about 5-fold, at least about 6-fold, at least about 7-fold, at least about 8-fold, at least about 9-fold, at least about 10-fold higher compared to the titer produced using a comparable siAAV construct not comprising the asRNA.

[0823] Embodiment I-265. The method of any one of embodiments I-254 to I-264, wherein the Class 2 CRISPR nuclease protein is a CasX.

[0824] Embodiment I-266. The method of embodiment I-265, wherein the encoded CasX comprises a sequence selected from the group consisting of SEQ ID NOS: 1-3, 49-321 and 2356-2488, or a sequence having at least 85%, at least 90%, at least 95%, at least 95%, at least 96%, at least 97%, at least 98%, or at least 99% identity thereto.

[0825] Embodiment I-267. The method of embodiment I-265, wherein the encoded CasX comprises a sequence selected from the group consisting of the sequences of SEQ ID NOS: 1-3, 49-321 and 2356-2488.

[0826] Embodiment I-268. The method of embodiment I-267, wherein the encoded CasX comprises the sequence of SEQ ID NO: 138, or a sequence having at least about 70%, at least about 80%, at least about 80%, at least about 85%, at least about 90%, or at least about 95%, or at least about 95%, or at least about 96%, or at least about 97%, or at least about 98%, or at least about 99% sequence identity thereto.

[0827] Embodiment I-269. The method of any one of embodiments I-254 to I-267, wherein the gRNA has a scaffold comprising a sequence selected from the group of sequences consisting of the sequences of SEQ ID NOS: 2101-2331, 3992-3995, and 4028, or a sequence having at least at least about 70%, at least about 80%, at least about 80%, at least about 85%, at least about 90%, or at least about 95%, or at least about 95%, or at least about 96%, or at least about 97%, or at least about 98%, or at least about 99% sequence identity thereto.

[0828] Embodiment I-270. The method of any one of embodiments I-254 to I-267, wherein the gRNA has a scaffold comprising a sequence selected from the group consisting of the sequences of SEQ ID NOS: 2101-2331, 3992-3995, and 4028.

[0829] Embodiment I-271. The method of embodiment I-270, wherein the gRNA has a scaffold comprising the sequence of SEQ ID NO: 2296, or a sequence having at least about 70%, at least about 80%, at least about 80%, at least about 85%, at least about 90%, or at least about 95%, or at least about 95%, or at least about 96%, or at least about 97%, or at least about 98%, or at least about 99% sequence identity thereto.

[0830] Embodiment I-272. A method for reducing premature cleavage of an siAAV transgene in a transfected packaging cell, wherein the siAAV transgene comprises one or more self-inactivating sequences and encodes a Class 2 CRISPR nuclease protein, a first gRNA comprising a targeting sequence that is complementary to and capable of hybridizing with a target nucleic acid of a cell to be modified, a second gRNA comprising a targeting sequence that is complementary to and capable of hybridizing with the one or more self-inactivating sequences, wherein the method comprises introducing a sequence encoding a third, non-targeting gRNA into the packaging cell transfected with the transgene, wherein the CRISPR nuclease protein and the first, the second, and the third gRNA are each capable of being expressed and each are capable of binding to the CRISPR nuclease protein.

[0831] Embodiment I-273. The method of embodiment I-272, wherein the sequence encoding the third gRNA is operably linked to a promoter of equal or stronger strength compared to a promoter operably linked to the first and the second gRNA.

[0832] Embodiment I-274. The method of embodiment I-273, wherein the promoters are selected from the group consisting of U6, mini U6, 5S, Adenovirus 2 (Ad2) VAI, 7SK, H1, bidirectional H1, bidirectional U6, bidirectional 7SK, and bidirectional U6.

[0833] Embodiment I-275. The method of embodiment I-274, wherein the third promoter is U6 and the first and second promoters are selected from the group consisting of H1, 7SK, and mini U6.

[0834] Embodiment I-276. The method of any one of embodiments I-272 to I-275, wherein the sequence encoding the third gRNA and linked promoter is linked to the 5′ end of the siAAV transgene.

[0835] Embodiment I-277. The method of any one of embodiments I-272 to I-275, wherein the sequence encoding the third gRNA and linked promoter is introduced into the packaging cell using a separate vector.

[0836] Embodiment I-278. The method of any one of embodiments I-272 to I-277, wherein the cell is a packaging cell selected from the group consisting of BHK, HEK293, HEK293T, NS0, SP2/0, YO myeloma cells, A549, P3X63 mouse myeloma cells, PER, PER.C6, NIH3T3, COS, HeLa, and CHO.

[0837] Embodiment I-279. The method of any one of embodiments I-272 to I-278, wherein upon expression of the third gRNA and CRISPR nuclease protein in the packaging cell, the third gRNA competes with the second gRNA for complexing with the CRISPR nuclease protein as an RNP, reducing the ability of the CRISPR nuclease to cleave the siAAV transgene.

[0838] Embodiment I-280. The method of embodiment I-279, wherein the cleavage of the siAAV transgene in the packaging cell is reduced by at least 40%, at least 50%, at least 60%, at least 70%, at least 80%, or at least 90% compared to a transfected packaging cell not comprising the third gRNA sequence, when assayed in a timed in vitro assay under comparable conditions.

[0839] Embodiment I-281. The method of embodiment I-279, wherein the titer of the siAAV produced by the packaging cell comprising the non-targeting gRNA is at least about 2-fold, at least about 3-fold, at least about 4-fold, at least about 5-fold, at least about 6-fold, at least about 7-fold, at least about 8-fold, at least about 9-fold, at least about 10-fold higher compared to the titer produced using a comparable siAAV construct not comprising the non-targeting gRNA.

[0840] Embodiment I-282. The method of any one of embodiments I-272 to I-281, wherein the Class 2 CRISPR nuclease protein is a CasX.

[0841] Embodiment I-283. The method of embodiment I-282, wherein the encoded CasX comprises a sequence selected from the group consisting of SEQ ID NOS: 1-3, 49-321 and 2356-2488, or a sequence having at least 85%, at least 90%, at least 95%, at least 95%, at least 96%, at least 97%, at least 98%, or at least 99% identity thereto.

[0842] Embodiment I-284. The method of embodiment I-282, wherein the encoded CasX comprises a sequence selected from the group consisting of the sequences of SEQ ID NOS: 1-3, 49-321 and 2356-2488.

[0843] Embodiment I-285. The method of embodiment I-282, wherein the Class 2 CRISPR protein is a CasX protein comprising the sequence of SEQ ID NO: 138, or a sequence having at least about 70%, at least about 80%, at least about 80%, at least about 85%, at least about 90%, or at least about 95%, or at least about 95%, or at least about 96%, or at least about 97%, or at least about 98%, or at least about 99% sequence identity thereto.

[0844] Embodiment I-286. The method of any one of embodiments I-272 to I-285, wherein the gRNA each have a scaffold comprising a sequence selected from the group of sequences consisting of the sequences of SEQ ID NOS: 2101-2331, 3992-3995, and 4028, or a sequence having at least at least about 70%, at least about 80%, at least about 80%, at least about 85%, at least about 90%, or at least about 95%, or at least about 95%, or at least about 96%, or at least about 97%, or at least about 98%, or at least about 99% sequence identity thereto.

[0845] Embodiment I-287. The method of any one of embodiments I-272 to I-285, wherein the gRNA each have a scaffold comprising a sequence selected from the group consisting of the sequences of SEQ ID NOS: 2101-2331, 3992-3995, 4028.

[0846] Embodiment I-288. The method of embodiment I-287, wherein the gRNA each have a scaffold comprising a sequence of SEQ ID NO: 2296.

### Set II

[0847] Embodiment II-1. A self-inactivating recombinant vector (SIRV) comprising a polynucleotide comprising:
[0848] a) one or more packaging components;
[0849] b) a sequence encoding a Class 2 Type V protein comprising a single RNA-guided RuvC domain;
[0850] c) a first promoter operably linked to the sequence encoding the Class 2 Type V protein;
[0851] d) a sequence encoding a first guide RNA (gRNA) comprising a scaffold sequence linked to a targeting sequence that is complementary to and capable of hybridizing with: 1) a target nucleic acid of a cell to be modified; and 2) one or more self-inactivating segments incorporated in the polynucleotide;
[0852] e) a second promoter sequence operably linked to the sequence encoding the first gRNA; and
[0853] f) one or more self-inactivating segments comprising a protospacer adjacent motif (PAM) sequence and a polynucleotide sequence capable of being bound and cleaved by a ribonuclear protein complex (RNP) comprising the Class 2 Type V protein and the first gRNA.

[0854] Embodiment II-2. The SIRV of embodiment II-1, wherein the one or more self-inactivating segments of the polynucleotide are located:
[0855] a) 5′ or 3′ adjacent to or within the sequence encoding the Class 2 Type V protein;
[0856] b) 5′ or 3′ adjacent to or within a Kozak sequence located between the first promoter and the sequence encoding the Class 2 Type V protein;
[0857] c) 5′ or 3′ adjacent to or within to the first promoter sequence;
[0858] d) 5′ or 3′ adjacent to or within the second promoter sequence;
[0859] e) 3′ downstream of the transcriptional start site for the sequence encoding the Class 2 Type V protein;
[0860] f) within one or more inserted introns in the polynucleotide encoding the Class 2 Type V protein;
[0861] g) at the 3′ end of the polynucleotide encoding the Class 2 Type V protein, between a stop codon and poly(A) termination site for the Class2 Type V protein; or
[0862] h) any combination of (a)-(g).

[0863] Embodiment II-3. The SIRV of any one of embodiments II-1 to II-2, wherein the self-inactivating segment comprises a sequence corresponding to any 15-21 nucleotide portion of the target nucleic acid sequence that is 3′ adjacent to a PAM sequence recognized by an RNP of the Class 2 Type V protein and the first gRNA.

[0864] Embodiment II-4. The SIRV of any one of embodiments II-1 to II-3, wherein the PAM sequence of the one or more self-inactivating segments:
[0865] a) is different by at least one nucleotide from the PAM sequence of the target nucleic acid of the cell to be modified; and
[0866] b) promotes less efficient cleavage or rate of cleavage of the self-inactivating segment by the RNP compared to the target nucleic acid of the cell to be modified.

[0867] Embodiment II-5. The SIRV of embodiment II-4, wherein:
[0868] a) if the PAM sequence of the target nucleic acid of the cell to be modified is TTC and the PAM preference of the Class 2 Type V protein is TTC, then the PAM sequence of the one or more self-inactivating segments is selected from the group consisting of ATC, CTC, TTT, GTT, and GTC;
[0869] b) if the PAM sequence of the target nucleic acid of the cell to be modified is ATC and the PAM preference of the Class 2 Type V protein is TTC, then the PAM sequence of the one or more self-inactivating segments is selected from the group consisting of CTC, TTT, GTT, and GTC; or
[0870] c) if the PAM sequence of the target nucleic acid of the cell to be modified is CTC and the PAM preference of the Class 2 Type V protein is TTC, then the PAM sequence of the one or more self-inactivating segments is TTT, GTT, ATC, or GTC.

[0871] Embodiment II-6. The SIRV of embodiment II-4, wherein:
[0872] a) if the PAM sequence of the target nucleic acid of the cell to be modified is ATC and the PAM preference of the Class 2 Type V protein is ATC, then the PAM sequence of the one or more self-inactivating segments is selected from the group consisting of TTC, CTC, TTT, GTT, and GTC;
[0873] b) if the PAM sequence of the target nucleic acid of the cell to be modified is CTC and the PAM preference of the Class 2 Type V protein is ATC, then the PAM sequence of the one or more self-inactivating segments is selected from the group consisting of TTC, TTT, GTT, and GTC; or
[0874] c) if the PAM sequence of the target nucleic acid of the cell to be modified is GTC and the PAM preference of the Class 2 Type V protein is ATC, then the PAM sequence of the one or more self-inactivating segments is TTC, TTT, CTC, or GTT.

[0875] Embodiment II-7. The SIRV of embodiment II-4, wherein:
[0876] a) if the PAM sequence of the target nucleic acid of the cell to be modified is GTC and the PAM preference of the Class 2 Type V protein is GTC, then the PAM sequence of the one or more self-inactivating segments is selected from the group consisting of ATC, CTC, TTT, GTT, and TTC.
[0877] b) if the PAM sequence of the target nucleic acid of the cell to be modified is GTC and the PAM preference of the Class 2 Type V protein is ATC, then the PAM sequence of the one or more self-inactivating segments is selected from the group consisting of TTC, TTT, GTT, and CTC; or
[0878] c) if the PAM sequence of the target nucleic acid of the cell to be modified is CTC and the PAM preference of the Class 2 Type V protein is GTC, then the PAM sequence of the one or more self-inactivating segments is TTC, TTT, ATC, or GTT.

[0879] Embodiment II-8. The SIRV of embodiment II-4, wherein:
[0880] a) if the PAM sequence of the target nucleic acid of the cell to be modified is CTC and the PAM preference of the Class 2 Type V protein is CTC, then the PAM sequence of the one or more self-inactivating segments is selected from the group consisting of ATC, GTC, TTT, GTT, and TTC.
[0881] b) if the PAM sequence of the target nucleic acid of the cell to be modified is ATC and the PAM preference of the Class 2 Type V protein is CTC, then the PAM sequence of the one or more self-inactivating segments is selected from the group consisting of GTC, TTT, GTT, and TTC; or
[0882] c) if the PAM sequence of the target nucleic acid of the cell to be modified is GTC and the PAM preference of the Class 2 Type V protein is CTC, then the PAM sequence of the one or more self-inactivating segments is TTC, TTT, ATC, or GTT.

[0883] Embodiment II-9. The SIRV of any one of embodiments II-1 to II-8, wherein the one or more self-inactivating segments each have between about 1 to about 5 bases that are not individually complementary to corresponding positions in the targeting sequence of the first gRNA.

[0884] Embodiment II-10. The SIRV of any one of embodiments II-1 to II-9, wherein the percent cleavage by the RNP of the self-inactivating segments of the polynucleotide in a cell transfected or transduced with the SIRV is at least about 10%, at least about 20%, at least about 30%, at least about 40%, at least about 50%, at least about 60%, at least about 70%, at least about 80%, or at least about 90% less than the cleavage of the target nucleic acid in the cell in a timed in vitro cell-based assay, when assayed under comparable conditions.

[0885] Embodiment II-11. The SIRV of any one of embodiments II-1 to II-9, wherein the time to achieve 90% cleavage by the RNP of the self-inactivating segments of the polynucleotide in a cell transfected or transduced with the SIRV is delayed, relative to the time to achieve 90% editing of the target nucleic acid in the cell, by at least about 1 day, at least about 2 days, at least about 3 days, at least about 4 days, at least about 5 days, at least about 6 days, at least about 7 days, at least about 8 days, or at least about 9 days, when assayed in an in vitro assay under comparable conditions.

[0886] Embodiment II-12. The SIRV of any one of embodiments II-1 to II-11, wherein cleavage by the RNP of the self-inactivating segments of the polynucleotide in a cell transfected or transduced with the SIRV has a k_{cleave} rate that is at least about 2-fold, at least about 4-fold, at least about 5-fold, at least about 6-fold, at least about 7-fold, at least about 8-fold, at least about 9-fold, or at least about 10-fold less than the k_{cleave} rate of the target nucleic acid in an in vitro cell-based assay, when assayed under comparable conditions.

[0887] Embodiment II-13. The SIRV of any one of embodiments II-1 to II-12, wherein cleavage by the RNP of the self-inactivating segment of the polynucleotide in a cell transduced or transfected with the SIRV results in reduced or eliminated expression of the Class 2 Type V protein or the gRNA encoded by the polynucleotide.

[0888] Embodiment II-14. The SIRV of any one of embodiments II-1 to II-13, wherein the Class 2 Type V protein further comprises one or more nuclear localization signals (NLS) located at or near the N-terminus and/or at or near the C-terminus of the Class 2 Type V protein.

[0889] Embodiment II-15. The SIRV of any one of embodiments II-1 to II-14, wherein the one or more NLS are selected from the group of sequences consisting of PKKKRKV (SEQ ID NO: 344), KRPAATKKAGQAKKKK (SEQ ID NO: 345), PAAKRVKLD (SEQ ID NO: 346), RQRRNELKRSP (SEQ ID NO: 347), NQSSNFGPMKGGNFGGRSSGPYGGGGQYFAKPRNQGGY (SEQ ID NO: 348), RMRIZFKNKGKDTAELRRRRVEVSVELRKAKKDEQILKRRNV (SEQ ID NO: 349), VSRKRPRP (SEQ ID NO: 350), PPKKARED (SEQ ID NO: 351), PQPKKKPL (SEQ ID NO:352), SALIKKKKKMAP (SEQ ID NO: 353), DRLRR (SEQ ID NO: 354), PKQKKRK (SEQ ID NO: 355), RKLKKKIKKL (SEQ ID NO: 356), REKKKFLKRR (SEQ ID NO: 357), KRKGDEVDGVDEVAKKKSKK (SEQ ID NO: 358), RKCLQAGMNLEARKTKK (SEQ ID NO: 359), PRPRKIPR (SEQ ID NO: 360), PPRKKRTVV (SEQ ID NO: 361), NLSKKKKRKREK (SEQ ID NO: 362), RRPSRPFRKP (SEQ ID NO: 363), KRPRSPSS (SEQ ID NO: 364), KRGINDRNFWRGENERKTR (SEQ ID NO: 365), PRPPKMARYDN (SEQ ID NO: 366), KRSFSKAF (SEQ ID NO: 367), KLKIKRPVK (SEQ ID NO: 368), PKTRRRPRRSQRKRPPT (SEQ ID NO: 370), SRRRKANPTKLSENAKKLAKEVEN (SEQ ID NO: 371), KTRRRPRRSQRKRPPT (SEQ ID NO: 372), RRKKRRPRRKKRR (SEQ ID NO: 373), PKKKSRKPKKKSRK (SEQ ID NO: 374), HKKKHPDASVNFSEFSK (SEQ ID NO: 375), QRPGPYDRPQRPGPYDRP (SEQ ID NO: 376), LSPSLSPLLSPSLSPL (SEQ ID NO: 377), RGKGGKGLGKGGAKRHRK (SEQ ID NO: 378), PKRGRGRPKRGRGR (SEQ ID NO: 379), MSRRRKANPTKLSENAKKLAKEVEN (SEQ ID NO: 598), PKKKRKVPPPPAAKRVKLD (SEQ ID NO: 380), PKKKRKVPPPPKKKRKV (SEQ ID NO: 381), PAKRARRGYKC (SEQ ID NO: 382); KLGPRKATGRW (SEQ ID NO: 383), PRRKREE (SEQ ID NO: 384), PLRKRPRR (SEQ ID NO: 386), PLRKRPRRGSPLRKRPRR (SEQ ID NO: 387), PAAKRVKLDGGKRTADGSEFESPKKKRKV (SEQ ID NO: 388), PAAKRVKLDGGKRTADGSEFESPKKKRKVGIHGVPAA (SEQ ID NO: 389), PAAKRVKLDGGKRTADGSEFESPKKKRKVAEAAAKEAAAKEAAAKA (SEQ ID NO: 390), PAAKRVKLDGGKRTADGSEFESPKKKRKVPG (SEQ ID NO: 391), KRKGSPERGERKRHW (SEQ ID NO: 392), KRTADSQHSTPPKTKRKVEFEPKKKRKV (SEQ ID NO: 393), PKKKRKVGGSKRTADSQHSTPPKTKRKVEFEPKKKRKV (SEQ ID NO: 394), MAPKKKRKVSR (SEQ ID NO: 771), and MAPKKKRKVGGSPKKKRKVGGSPKKKRKVGGSPKKKRKVSR (SEQ ID NO: 772) wherein the one or more NLS are linked to the Type V protein or to adjacent NLS with a linker peptide wherein the linker peptide is selected from the group consisting of RS, (G)n (SEQ ID NO: 395), (GS)n (SEQ ID NO: 396), (GSGGS)n (SEQ ID NO: 397), (GGSGGS)n (SEQ ID NO: 398), (GGGS)n (SEQ ID NO: 399), GGSG (SEQ ID NO: 400), GGSGG (SEQ ID NO: 401), GSGSG (SEQ ID NO: 402), GSGGG (SEQ ID NO: 403), GGGSG (SEQ ID NO: 404), GSSSG (SEQ ID NO:405), GPGP (SEQ ID NO: 406), GGP, PPP, PPAPPA (SEQ ID NO: 407), PPPG (SEQ ID NO: 408), PPPGPPP (SEQ ID NO: 409), PPP(GGGS)n (SEQ ID NO: 410), (GGGS)nPPP (SEQ ID NO: 411), AEAAAKEAAAKEAAAKA (SEQ ID NO: 412), and TPPKTKRKVEFE (SEQ ID NO: 413), wherein n is 1 to 5.

[0890] Embodiment II-16. The SIRV of any one of embodiments II-1 to II-14, wherein the one or more encoded NLS are selected from the group consisting of SEQ ID NOS: 538-597, 599-610, 613, 771-772, 844-846, and 2498-2591 set forth in Table 7, Table 22 and Table 23.

[0891] Embodiment II-17. The SIRV of any one of embodiments II-1 to II-16, wherein the Class 2 Type V protein is a CasX protein selected from the group of sequences consisting of SEQ ID NOs: 1-3, 49-321 and 2356-2488, or a sequence having at least about 70%, at least about 80%, at least about 80%, at least about 85%, at least about 90%, or at least about 95%, or at least about 95%, or at least about 96%, or at least about 97%, or at least about 98%, or at least about 99% sequence identity thereto.

[0892] Embodiment II-18. The SIRV of any one of embodiments II-1 to II-17, wherein the first gRNA has a scaffold comprising a sequence selected from the group of sequences consisting of SEQ ID NOS: 2101-2331, 3992-3995, and 4028 or a sequence having at least about 70%, at least about 80%, at least about 80%, at least about 85%, at least about 90%, or at least about 95%, or at least about 95%, or at least about 96%, or at least about 97%, or at least about 98%, or at least about 99% sequence identity thereto.

[0893] Embodiment II-19. The SIRV of any one of embodiments II-1 to II-19, wherein the first gRNA comprises a targeting sequence having 15 nucleotides, 16 nucleotides, 17, nucleotides, 18 nucleotides, 19 nucleotides, or 20 nucleotides.

[0894] Embodiment II-20. The SIRV of any one of embodiments II-17 to II-19, wherein the CasX protein is capable of forming a ribonuclear protein complex (RNP) with the first gRNA upon expression in the cell.

[0895] Embodiment II-21. The SIRV of embodiment II-20, wherein the RNP is capable of cleaving the target nucleic acid and the self-inactivating segment.

[0896] Embodiment II-22. The SIRV of any one of embodiments II-1 to II-21, wherein the packaging element comprises AAV 5′ and 3′ inverted terminal repeats (ITR), wherein the AAV 5′ and 3′ ITRs are derived from serotype AAV1, AAV2, AAV3, AAV4, AAV5, AAV6, AAV7, AAV8, AAV9, AAV10, AAV11, AAV12, AAV 44.9, AAV 9.45, AAV 9.61, AAV-Rh74, AAVRh10, or chimeric combinations thereof.

[0897] Embodiment II-23. The SIRV of embodiment II-22, wherein the ITRs are derived from serotype AAV2.

[0898] Embodiment II-24. An SIRV comprising a polynucleotide comprising:
[0899] a) one or more packaging components;
[0900] b) a sequence encoding a Class 2 Type V protein;
[0901] c) a first promoter operably linked to the sequence encoding the Class 2 Type V protein;
[0902] d) a sequence encoding a first guide RNA (gRNA) comprising a scaffold sequence and a linked targeting sequence that is complementary to a target nucleic acid of a cell to be modified;
[0903] e) a second promoter sequence operably linked to the sequence encoding the first gRNA; and one or more of:
[0904] f) a sequence encoding a second gRNA comprising a targeting sequence complementary to both a target nucleic acid of a cell to be modified and to one or more self-inactivating segments of the SIRV, wherein the second gRNA comprises a scaffold sequence identical to the scaffold sequence of the first gRNA, wherein:
   [0905] 1) the sequence of the one or more self-inactivating segments is different by one or more nucleotides from the sequence of the target nucleic acid of the cell to be modified and promotes less efficient cleavage or rate of cleavage of the self-inactivating segment by the RNP compared to the target nucleic acid of the cell to be modified; and
   [0906] 2) the targeting sequence of the second gRNA is complementary to different or overlapping regions of the target nucleic acid sequence compared to the targeting sequence of the first gRNA;
[0907] g) a sequence encoding a second gRNA comprising a targeting sequence complementary to the one or more self-inactivating segments, the second gRNA comprising a scaffold sequence different from the scaffold sequence of the first gRNA, wherein the second gRNA promotes less efficient editing and/or cleavage by an RNP comprising the Class 2 Type V protein and the second gRNA compared to an RNP comprising the Class 2 Type V protein and the first gRNA;
[0908] h) a sequence encoding a second gRNA comprising a targeting sequence complementary to both a target nucleic acid of a cell to be modified and to one or more self-inactivating segments of the SIRV, wherein the second gRNA comprises a scaffold sequence identical to the scaffold sequence of the first gRNA, wherein:
   [0909] 1) the PAM sequence of the one or more self-inactivating segments is different by at least one nucleotide from the PAM sequence of the target nucleic acid of the cell to be modified and promotes less efficient cleavage or rate of cleavage of the self-inactivating segment by the RNP compared to the target nucleic acid of the cell to be modified; and
   [0910] 2) the targeting sequence of the second gRNA is complementary to different or overlapping regions of the target nucleic acid sequence compared to the targeting sequence of the first gRNA; and
[0911] i) a third promoter sequence operably linked to the sequence encoding the second gRNA;
[0912] wherein the polynucleotide comprises one or more self-inactivating segments comprising a protospacer adjacent motif (PAM) sequence and a polynucleotide sequence capable of being bound and cleaved by a ribonuclear protein complex (RNP) of the Class 2 Type V protein and the second gRNA.

[0913] Embodiment II-25. The SIRV of embodiment II-24, comprising components (a)-(f), and (i).

[0914] Embodiment II-26. The SIRV of embodiment II-24, comprising components (a)-(e), (g), and (i).

[0915] Embodiment II-27. The SIRV of embodiment II-24, comprising components (a)-(e), (h) and (i).

[0916] Embodiment II-28. The SIRV of any one of embodiments II-24 to II-27, wherein the one or more self-inactivating segments of the polynucleotide are located:
[0917] a) 5′ or 3′ adjacent to or within the sequence encoding the Class 2 Type V protein;
[0918] b) 5′ or 3′ adjacent to or within a Kozak sequence located between the first promoter and the sequence encoding the Class 2 Type V protein;
[0919] c) 5′ or 3′ adjacent to or within to the first promoter sequence;
[0920] d) 5′ or 3′ adjacent to or within the second promoter sequence;
[0921] e) 5′ or 3′ adjacent to or within the third promoter sequence;
[0922] f) 3′ downstream of the transcriptional start site for the sequence encoding the Class 2 Type V protein;
[0923] g) within one or more inserted introns in the sequence encoding the Class 2 Type V protein;
[0924] h) at the 3′ end of the polynucleotide encoding the Class 2 Type V protein, between a stop codon and poly(A) termination site of the sequence encoding the Class 2 Type V; or
[0925] i) any combination of (a)-(h).

[0926] Embodiment II-29. The SIRV of embodiment II-28, wherein the self-inactivating segment comprises a 15-21 nucleotide sequence complementary to the targeting sequence of the second gRNA and that is 3′ adjacent to a PAM sequence recognized by an RNP of the Class 2 Type V protein and the second gRNA.

[0927] Embodiment II-30. The SIRV of any one of embodiments II-24 to II-29, wherein cleavage of the self-inactivating segments in a cell transduced or transfected with the SIRV by the RNP of the Class 2 Type V protein and the second gRNA results in reduced or eliminated expression of the Class 2 Type V protein or the gRNA encoded by the polynucleotide.

[0928] Embodiment II-31. The SIRV of any one of embodiments II-24 to II-30, wherein the PAM sequence of the one or more self-inactivating segments:
[0929] a) is different from the PAM sequence of the target nucleic acid of the cell to be modified; and
[0930] b) promotes less efficient cleavage or rate of cleavage of the self-inactivating segment by the RNP of the Class 2 Type V protein and the second gRNA compared to the PAM of the target nucleic acid of the cell to be modified.

[0931] Embodiment II-32. The SIRV of embodiment II-31, wherein:
[0932] a) if the PAM sequence of the target nucleic acid of the cell to be modified is TTC and the PAM preference of the Class 2 Type V protein is TTC, then the PAM sequence of the one or more self-inactivating segments is selected from the group consisting of ATC, CTC, TTT, GTT, and GTC;
[0933] b) if the PAM sequence of the target nucleic acid of the cell to be modified is ATC and the PAM preference of the Class 2 Type V protein is TTC, then the PAM sequence of the one or more self-inactivating segments is selected from the group consisting of CTC, TTT, GTT, and GTC; or
[0934] c) if the PAM sequence of the target nucleic acid of the cell to be modified is CTC and the PAM preference of the Class 2 Type V protein is TTC, then the PAM sequence of the one or more self-inactivating segments is GTC, TTT, ATC, or GTT.

[0935] Embodiment II-33. The SIRV of embodiment II-31, wherein:
[0936] a) if the PAM sequence of the target nucleic acid of the cell to be modified is ATC and the PAM preference of the Class 2 Type V protein is ATC, then the PAM sequence of the one or more self-inactivating segments is selected from the group consisting of TTC, CTC, TTT, GTT, and GTC;
[0937] b) if the PAM sequence of the target nucleic acid of the cell to be modified is CTC and the PAM preference of the Class 2 Type V protein is ATC, then the PAM sequence of the one or more self-inactivating segments is selected from the group consisting of TTC, TTT, GTT, and GTC; or
[0938] c) if the PAM sequence of the target nucleic acid of the cell to be modified is GTC and the PAM preference of the Class 2 Type V protein is ATC, then the PAM sequence of the one or more self-inactivating segments is TTC, TTT, CTC, or GTT.

[0939] Embodiment II-34. The SIRV of embodiment II-31, wherein:
[0940] a) if the PAM sequence of the target nucleic acid of the cell to be modified is GTC and the PAM preference of the Class 2 Type V protein is GTC, then the PAM sequence of the one or more self-inactivating segments is selected from the group consisting of ATC, CTC, TTT, GTT, and TTC.
[0941] b) if the PAM sequence of the target nucleic acid of the cell to be modified is GTC and the PAM preference of the Class 2 Type V protein is ATC, then the PAM sequence of the one or more self-inactivating segments is selected from the group consisting of TTC, TTT, GTT, and CTC; or
[0942] c) if the PAM sequence of the target nucleic acid of the cell to be modified is CTC and the PAM preference of the Class 2 Type V protein is GTC, then the PAM sequence of the one or more self-inactivating segments is TTC, TTT, ATC, or GTT.

[0943] Embodiment II-35. The SIRV of embodiment II-31, wherein:
[0944] a) if the PAM sequence of the target nucleic acid of the cell to be modified is CTC and the PAM preference of the Class 2 Type V protein is CTC, then the PAM sequence of the one or more self-inactivating segments is selected from the group consisting of ATC, GTC, TTT, GTT, and TTC.
[0945] b) if the PAM sequence of the target nucleic acid of the cell to be modified is ATC and the PAM preference of the Class 2 Type V protein is CTC, then the PAM sequence of the one or more self-inactivating segments is selected from the group consisting of GTC, TTT, GTT, and TTC; or
[0946] c) if the PAM sequence of the target nucleic acid of the cell to be modified is GTC and the PAM preference of the Class 2 Type V protein is CTC, then the PAM sequence of the one or more self-inactivating segments is TTC, TTT, ATC, or GTT.

[0947] Embodiment II-36. The SIRV of any one of embodiments II-24 to II-35, wherein the one or more self-inactivating segment sequences each have between 1 to 5 bases that are not complementary to corresponding positions in the targeting sequence of the second gRNA.

[0948] Embodiment II-37. The SIRV of any of embodiments II-24 to II-36, wherein the RNP of the Class 2 Type V protein and second gRNA exhibit less efficient cleavage of the self-inactivating segment compared to the cleavage of the target nucleic acid of the cell by the RNP of the Class 2 Type V protein and first gRNA.

[0949] Embodiment II-38. The SIRV of any one of embodiments II-24 to II-37, wherein the third promoter sequence is different from the second promoter sequence and is less efficient at initiating transcription of the second gRNA compared to the second promoter initiating transcription of the first gRNA.

[0950] Embodiment II-39. The SIRV of embodiment II-38, wherein the second promoter is U6 and the third promoter is selected from the group consisting of H1, 7SK, and mini U6.

[0951] Embodiment II-40. The SIRV of any one of embodiments II-24 to II-39, wherein the Class 2 Type V protein further comprises one or more nuclear localization signals (NLS).

[0952] Embodiment II-41. The SIRV of any one of embodiments II-24 to II-40, wherein the Type V protein is a CasX protein selected from the group consisting of SEQ ID NOs: 1-3 and 49-321 and 2356-2488, or a sequence having at least about 70%, at least about 80%, at least about 80%, at least about 85%, at least about 90%, or at least about 95%, or at least about 95%, or at least about 96%, or at least about 97%, or at least about 98%, or at least about 99% sequence identity thereto.

[0953] Embodiment II-42. The SIRV of any one of embodiments II-24 to II-41, wherein the second guide comprises a sequence selected from the group consisting of SEQ ID NO: 2101-2238 and the first guide comprises a sequence selected from the group consisting of SEQ ID NOS: 2276-2296.

[0954] Embodiment II-43. The SIRV of any one of embodiments II-24 to II-42, wherein the first and second gRNA each comprise a targeting sequence having 15 nucleotides, 16 nucleotides, 17, nucleotides, 18 nucleotides, 19 nucleotides, or 20 nucleotides.

[0955] Embodiment II-44. The SIRV of any one of embodiments II-41 to II-43, wherein the CasX protein is capable of forming a ribonuclear protein complex (RNP) with the first gRNA and the second gRNA upon expression in a cell transduced or transfected with the SIRV.

[0956] Embodiment II-45. The SIRV of embodiment II-44, wherein the RNP of the CasX protein and the first gRNA is capable of cleaving the target nucleic acid and wherein the RNP of the CasX protein and the second gRNA is capable of cleaving the self-inactivating segment, and wherein the RNP of the CasX protein and the second gRNA exhibit a cleavage rate of the self-inactivating segments that is less efficient compared to the cleavage or rate of cleavage of the target nucleic acid by an RNP of the CasX protein and the first gRNA.

[0957] Embodiment II-46. The SIRV of any one of embodiments II-24 to II-45, wherein the packaging element is an AAV 5′ and 3′ inverted terminal repeat (ITR), wherein the AAV 5′ and 3′ ITRs are derived from serotype AAV1, AAV2, AAV3, AAV4, AAV5, AAV6, AAV7, AAV8, AAV9, AAV10, AAV11, AAV12, AAV 44.9, AAV 9.45, AAV 9.61, AAV-Rh74, AAVRh10, or a chimeric combination thereof.

[0958] Embodiment II-47. The SIRV of any one of embodiments II-1 to II-46, wherein the polynucleotide comprises a sequence selected from the group consisting of SEQ ID NOs 4151-4156, or a sequence having at least about 70%, at least about 80%, at least about 80%, at least about 85%, at least about 90%, or at least about 95%, or at least about 95%, or at least about 96%, or at least about 97%, or at least about 98%, or at least about 99% sequence identity thereto.

[0959] Embodiment II-48. A self-inactivating viral-derived particle comprising
[0960] a) a viral capsid derived from an AAV serotype selected from the group consisting of AAV1, AAV2, AAV3, AAV4, AAV5, AAV6, AAV7, AAV8, AAV9, AAV10, AAV11, AAV12, AAV 44.9, AAV 9.45, AAV 9.61, AAV-Rh74, AAVRh10, and chimeras thereof;
[0961] b) 5′ and 3′ AAV ITR packaging components selected from the same serotype as the AAV capsid; and
[0962] c) the SIRV of any one of embodiments II-1 to II-47.

[0963] Embodiment II-49. A method of modifying a target nucleic acid sequence in a cell, comprising transfecting the cell with the SIRV of any one of embodiments II-1 to II-47, wherein the target nucleic acid sequence is modified by an RNP of the expressed Class 2 Type V protein and the first gRNA.

[0964] Embodiment II-50. The method of embodiment II-49, wherein the modifying comprises introducing a single-stranded break or a double-stranded break in the target nucleic acid sequence of the cell.

[0965] Embodiment II-51. The method of embodiment II-49, wherein the modifying comprises introducing an insertion, deletion, or mutation in the target nucleic acid sequence of the cell.

[0966] Embodiment II-52. The method of any one of embodiments II-49 to II-51, wherein the self-inactivating segment is cleaved by an RNP of the Class 2 Type V protein and the first gRNA subsequent to the modifying of the target nucleic acid sequence of the cell.

[0967] Embodiment II-53. The method of embodiment II-52, wherein the self-inactivating segment is cleaved at least 1 day, at least 2 days, at least 3 days, at least 4 days, at least 5 days, at least 6 days, or at least 7 days after the modifying of the target nucleic acid sequence.

[0968] Embodiment II-54. The method of any one of embodiments II-49 to II-53, wherein the cleavage of the self-inactivating segment results in reduced off-target modifying of nucleic acid sequence in the cell compared to a cell transduced with an SIRV not comprising the self-inactivating segments.

[0969] Embodiment II-55. The method of any one of embodiments II-49 to II-53, wherein the cleavage of the self-inactivating segment results in reduced or eliminated expression of the Class 2 Type V protein in the cell.

[0970] Embodiment II-56. A composition comprising:
[0971] a) an AAV expression cassette; and
[0972] b) a polynucleotide comprising sequences encoding one or more small hairpin RNA (shRNA) sequences, each operably linked to a promoter.

[0973] Embodiment II-57. The composition of embodiment II-56, wherein the AAV expression cassette comprises
[0974] a) a first adeno-associated virus (AAV) inverted terminal repeat (ITR) sequence;
[0975] b) a second AAV ITR sequence;
[0976] c) a sequence encoding a Class 2 Type V protein having a single RNA-guided RuvC domain;
[0977] d) a first promoter operably linked to the sequence encoding the Class 2 Type V protein;
[0978] e) a sequence encoding a first guide RNA (gRNA) comprising a scaffold sequence and a linked targeting sequence that is complementary to and capable of hybridizing with a target nucleic acid of a cell to be modified; and
[0979] f) a second promoter sequence operably linked to the sequence encoding the first gRNA.

[0980] Embodiment II-58. The composition of embodiment II-56 or II-57, wherein the polynucleotide comprises an encoding sequence for one, two, or three shRNA and linked promoters.

[0981] Embodiment II-59. The composition of any one of embodiments II-56 to II-58, wherein the shRNA encoding sequence comprises a sequence selected from the group consisting of SEQ ID NOS: 2640-2687, or a sequence having at least 85%, at least 90%, at least 95%, at least 95%, at least 96%, at least 97%, at least 98% identity thereto.

[0982] Embodiment II-60. The composition of any one of embodiments II-56, wherein the polynucleotide comprising the shRNA and linked promoters are linked exterior to the AAV transgene incorporated into a bacterial plasmid backbone.

[0983] Embodiment II-61. The composition of any one of embodiments II-56 to II-60, wherein the polynucleotide comprising the shRNA and linked promoters are inserted into
[0984] a) an AAV RepCap plasmid;
[0985] b) an AAV Helper plasmid; and/or
[0986] c) a separate vector.

[0987] Embodiment II-62. The composition of any one of embodiments II-57 to II-61, wherein the encoded Class 2, Type V protein comprises a sequence selected from the group consisting of SEQ ID NOS: 1-3, 49-321 and 2356-2488, or a sequence having at least 85%, at least 90%, at least 95%, at least 95%, at least 96%, at least 97%, at least 98%, or at least 99% identity thereto.

[0988] Embodiment II-63. The composition of any one of embodiments II-57 to II-62, wherein the first gRNA comprises a scaffold sequence selected from the group of sequences consisting of SEQ ID NOS: 2101-2331, 3992-3995, and 4028 or a sequence having at least 85%, at least 90%, at least 95%, at least 95%, at least 96%, at least 97%, at least 98% identity thereto.

[0989] Embodiment II-64. The composition of any one of embodiments II-57 to II-63, wherein the Class 2, Type V protein and gRNA encoding sequences are capable of being transcribed in a packaging cell transfected with the AAV expression cassette.

[0990] Embodiment II-65. The composition of any one of embodiments II-56 to II-64, wherein the shRNA is capable of being expressed and processed in a packaging cell transfected with the polynucleotide into a siRNA sequence complementary to and capable of hybridizing with an mRNA of the Class 2, Type V protein transcribed by the packaging cell.

[0991] Embodiment II-66. The composition of embodiment II-65, wherein the packaging cell is selected from the group consisting of baby hamster kidney (BHK), human embryonic kidney 293 (HEK293), HEK293T, NS0, SP2/0, YO myeloma cells, A549, P3X63 mouse myeloma cells, PER, PER.C6, NIH3T3, COS, HeLa, and Chinese hamster ovary (CHO).

[0992] Embodiment II-67. The composition of embodiment II-65 or II-66, wherein upon hybridization of the siRNA sequence to the mRNA of the Class 2, Type V protein, the Class 2, Type V protein mRNA is degraded such that expression of the Class 2, Type V protein is reduced or eliminated in the packaging cell.

[0993] Embodiment II-68. The composition of embodiment II-67, wherein expression of the Class 2, Type V protein is reduced by at least 40%, at least 50%, at least 60%, at least 70%, at least 80%, or at least 90% compared to a transfected packaging cell not comprising the shRNA, when assayed in a timed in vitro assay under comparable conditions.

[0994] Embodiment II-69. The composition of any one of embodiments II-57 to II-68, wherein the AAV expression cassette comprises
[0995] a) one or more self-inactivating segments comprising a protospacer adjacent motif (PAM) sequence and a polynucleotide sequence capable of being bound and cleaved by a ribonuclear protein complex (RNP) of the Class 2 Type V protein and a second gRNA;
[0996] b) a sequence encoding a second gRNA comprising a targeting sequence complementary to the self-inactivating segment; and
[0997] c) a third promoter operably linked to the second gRNA.

[0998] Embodiment II-70. The composition of embodiment II-69, wherein the second gRNA comprises a scaffold sequence selected from the group of sequences consisting of SEQ ID NOS: 2101-2331, 3992-3995, and 4028 or a sequence having at least 85%, at least 90%, at least 95%, at least 95%, at least 96%, at least 97%, at least 98% identity thereto.

[0999] Embodiment II-71. The composition of embodiment II-69 or II-70, wherein the one or more self-inactivating segments of the polynucleotide are located:
[1000] a) 5′ or 3′ adjacent to or within the sequence encoding the Class 2 Type V protein;
[1001] b) 5′ or 3′ adjacent to or within a Kozak sequence located between the first promoter and the sequence encoding the Class 2 Type V protein;
[1002] c) 5′ or 3′ adjacent to or within to the first promoter sequence;
[1003] d) 5′ or 3′ adjacent to or within the second promoter sequence;
[1004] e) 5′ or 3′ adjacent to or within the third promoter sequence;
[1005] f) 3′ downstream of the transcriptional start site for the sequence encoding the Class 2 Type V protein;
[1006] g) within one or more inserted introns in the polynucleotide encoding the Class 2 Type V protein;
[1007] h) at the 3′ end of the polynucleotide encoding the Class 2 Type V protein, between a stop codon and poly(A) termination site of the sequence encoding the Class 2 Type V protein; or
[1008] i) any combination of (a)-(h).

[1009] Embodiment II-72. The composition of any one of embodiments II-69 to II-71, wherein the self-inactivating segment comprises a 15-21 nucleotide sequence complementary to the targeting sequence of the second gRNA and that is 3′ adjacent to a PAM sequence recognized by an RNP of the Class 2 Type V protein and the second gRNA.

[1010] Embodiment II-73. The composition of any one of embodiments II-69 to II-72, wherein cleavage of the self-inactivating segments in a cell transfected with the composition by the RNP of the Class 2 Type V protein and the second gRNA results in reduced or eliminated expression of the Class 2 Type V protein or the gRNA encoded by the polynucleotide.

[1011] Embodiment II-74. The composition of any one of embodiments II-69 to II-73, wherein the PAM sequence of the one or more self-inactivating segments promotes less efficient cleavage or rate of cleavage of the self-inactivating segment by the RNP of the Class 2 Type V protein and the second gRNA compared to the PAM sequence 5′ and adjacent to the target nucleic acid of the cell to be modified.

[1012] Embodiment II-75. A method for reducing premature cleavage of a self-inactivating AAV (siAAV) transgene encoding a Class 2 Type V nuclease protein and one or more gRNAs in a packaging cell, comprising introducing a polynucleotide sequence encoding one or more small hairpin RNA (shRNA) into the packaging cell comprising the siAAV transgene, wherein the shRNA is capable of being expressed and processed into an siRNA sequence, and wherein the siRNA sequence is complementary to an mRNA of the Class 2 Type V nuclease transcribed by the packaging cell.

[1013] Embodiment II-76. The method of embodiment II-75, wherein the packaging cell is transfected with the siAAV transgene.

[1014] Embodiment II-77. The method of embodiment II-75 or II-76, wherein the transgene comprises
[1015] a) a first adeno-associated virus (AAV) inverted terminal repeat (ITR) sequence;
[1016] b) a second AAV ITR sequence;
[1017] c) a sequence encoding a Class 2 Type V protein having a single RNA-guided RuvC domain;
[1018] d) a first promoter operably linked to the sequence encoding the Class 2 Type V protein;
[1019] e) a sequence encoding a first guide RNA (gRNA) comprising a scaffold sequence and a linked targeting sequence that is complementary to and capable of hybridizing with a target nucleic acid of a cell to be modified; and
[1020] f) a second promoter sequence operably linked to the sequence encoding the first gRNA
[1021] g) a sequence encoding a second guide RNA (gRNA) comprising a scaffold sequence and a linked targeting sequence complementary to one or more self-inactivating segments of the transgene;
[1022] h) a third promoter sequence operably linked to the sequence encoding the second gRNA, wherein the third promoter has a sequence different from the sequence of the second promoter; and
[1023] i) one or more self-inactivating segments of the polynucleotide comprising a protospacer adjacent motif (PAM) sequence and a polynucleotide sequence capable of being bound and cleaved by a ribonuclear protein complex (RNP) of the Class 2 Type V protein and the second gRNA.

[1024] Embodiment II-78. The method of any one of embodiments II-75 to II-77, wherein the polynucleotide comprises an encoding sequence for one, two, or three shRNA and linked promoters.

[1025] Embodiment II-79. The method of any one of embodiments II-75 to II-78, wherein the shRNA encoding sequence comprises a sequence selected from the group consisting of SEQ ID NOS: 2640-2687, or a sequence having at least 85%, at least 90%, at least 95%, at least 95%, at least 96%, at least 97%, at least 98% identity thereto.

[1026] Embodiment II-80. The method of embodiment II-78 or II-79, wherein the polynucleotide comprising the shRNA and linked promoters are linked exterior to the AAV transgene inserted into a bacterial plasmid backbone.

[1027] Embodiment II-81. The method of any one of embodiments II-78 to II-80, wherein the polynucleotide comprising the shRNA and linked promoters are inserted into;
[1028] a) an AAV RepCap plasmid;
[1029] b) an AAV Helper plasmid; and/or
[1030] c) a separate vector.

[1031] Embodiment II-82. The method of any one of embodiments II-75 to II-81, wherein the packaging cell is selected from the group consisting of BHK, HEK293, HEK293T, NS0, SP2/0, YO myeloma cells, A549, P3X63 mouse myeloma cells, PER, PER.C6, NIH3T3, COS, HeLa, and CHO.

[1032] Embodiment II-83. The method of any one of embodiments II-75 to II-82, wherein upon transcription of the shRNA and Class 2 Type V Type V nuclease sequences, the shRNA is processed into siRNA which hybridizes with the mRNA of the Class 2 Type V nuclease and is degraded by the packaging cell.

[1033] Embodiment II-84. The method of embodiment II-83, wherein expression of the Class 2 Type V nuclease protein in the packaging cell is repressed by at least 40%, at least 50%, at least 60%, at least 70%, at least 80%, or at least 90% compared to a transfected packaging cell not comprising the shRNA sequence, when assayed in a timed in vitro assay under comparable conditions.

[1034] Embodiment II-85. The method of any one of embodiments II-75 to II-84, wherein the Class 2 Type V nuclease protein is a CasX comprising a sequence selected from the group consisting of SEQ ID NOS: 1-3, 49-321 and 2356-2488, or a sequence having at least 85%, at least 90%, at least 95%, at least 95%, at least 96%, at least 97%, at least 98%, or at least 99% identity thereto.

[1035] Embodiment II-86. The method of any one of embodiments II-77 to II-85, wherein the first and second gRNA each have a scaffold comprising a sequence selected from the group of sequences of SEQ ID NOS: 2101-2331, 3992-3995, and 4028 or a sequence having at least about 70%, at least about 80%, at least about 90%, at least about 95%, at least about 96%, at least about 97%, at least about 98%, at least about 99%, or 100% sequence identity thereto.

[1036] Embodiment II-87. The method of any one of embodiments II-77 to II-85, wherein the second guide comprises a sequence selected from the group consisting of SEQ ID NO: 2101-2238 and the first guide comprises a sequence selected from the group consisting of SEQ ID NOS: 2276-2296.

### EXAMPLES

### Example 1: Small CRISPR Proteins can Edit the Genome when Expressed from an AAV Episome In Vitro

[1037] This experiment demonstrated that small CRISPR proteins (such as CasX) can edit a genome when expressed from an AAV plasmid or an AAV vector in vitro.

### Materials and Methods

[1038] The AAV transgene between the ITRs was broken into different parts, which consisted of the therapeutic cargo and accessory elements relevant to expression of the therapeutic cargo in mammalian cells. AAV vectors were designed, built, and tested in both plasmid and AAV form in mammalian cells. A schematic of a representative AAV transgene and one configuration of its components is shown in FIG. 1.

[1039] In this example, three plasmids were constructed (AAV construct 1, AAV construct 2, and AAV construct 3; see Table 64 for component sequences), where the only difference in the plasmid sequence between the ITRs was in the affinity tag region.

### Cloning and Quality Control (QC):

[1040] AAV vectors were cloned using a 4-part Golden Gate Assembly consisting of a pre-digested AAV backbone, small CRISPR protein-encoding DNA, and flanking 5′ and 3′ DNA sequences. 5′ sequences contained enhancer, protein promoter and N-terminal NLS, while 3′ sequences contained C-terminal NLS, Woodchuck Hepatitis Virus (WHV) Posttranscriptional Regulatory Element (WPRE), poly(A) signal, RNA promoter and guide RNA containing spacer 12.7, targeting tdTomato (DNA sequence: CTGCATTCTAGTTGTGGTTT, SEQ ID NO: 462). 5′ and 3′ parts were ordered as gene fragments, PCR-amplified, and assembled into AAV vectors through cyclical Golden Gate reactions using T4 Ligase and BbsI.

[1041] Assembled AAV vectors were then transformed into chemically-competent E. coli (Stbl3s). Transformed cells were recovered for 1 hour in a 37° C. shaking incubator, plated on Kanamycin LB-Agar plates and allowed to grow at 37° C. for 12-16 hours. Colony PCR was performed to determine clones that contained full transgenes. Correct clones were inoculated in 50 mL of LB media with kanamycin and grown overnight. Plasmids were then midi-prepped the following day and sequence-verified. To assess the quality of midipreps, constructs were processed in restriction digests with XmaI (which cuts in each of the ITRs) and XhoI (which cuts once in the AAV genome). Digests and uncut constructs were then run on a 1% agarose gel and imaged on a ChemiDoc. If the plasmid was >90% supercoiled, the correct size, and the ITRs were intact, the construct was tested via nucleofection and/or transduction.

### Method for Plasmid Nucleofection:

[1042] Plasmids containing the AAV genome were transfected in a mouse immortalized neural progenitor cell line isolated from the Ai9-tdTomato mouse (tdTomato mNPCs) using the Lonza P3 Primary Cell 96-well Nucleofector Kit. Briefly, Ai9 is a Cre reporter tool strain designed to have a loxP flanked STOP cassette preventing the transcription of a CAG promoter-driven tdTomato marker. Ai9 mice, or Ai9 mNPCs, express tdTomato following Cre-mediated recombination to remove the STOP cassette. Sequence-validated plasmids were diluted to concentrations of 200 ng/μl, 100 ng/μl, 50 ng/μL and 25 ng/μL, and 5 μL of each (1000 ng, 500 ng, 250 ng and 125 ng) were added to P3 solution containing 200,000 tdTomato mNPCs. The combined solution was nucleofected using a Lonza 4D Nucleofector System following program EH-100. Following nucleofection, the solution was quenched with pre-equilibrated mNPC medium (DMEM/F12 with GlutaMax™, 10 mM HEPES, 1×MEM Non-Essential Amino Acids, 1× penicillin/streptomycin, 1:1000 2-mercaptoethanol, 1×B-27 supplement, minus vitamin A, 1×N2 with supplemented growth factors bFGF and EGF (20 ng/mL final concentration). The solution was then aliquoted in triplicate (approx. 67,000 cells per well) in a 96-well plate coated with PLF (1×Poly-DL-ornithine hydrobromide, 10 mg/mL in sterile diH₂O, 1× laminin, and 1× fibronectin). 48 hours after transfection, treated cells were replenished with fresh mNPC media containing growth factors. 5 days after transfection, tdTomato mNPCs were lifted and activity was assessed by FACS.

### AAV Production:

[1043] Suspension HEK293T cells were adapted from parental HEK293T and grown in FreeStyle 293 media. For screening purposes, small scale cultures (20-30 mL cultured in 125 mL Erlenmeyer flasks and agitated at 110 rpm) were diluted to a density of 1.5e+6 cells/mL on the day of transfection. Endotoxin-free pAAV plasmids with the transgene flanked by ITR repeats were co-transfected with plasmids supplying the adenoviral helper genes for replication and AAV rep/cap genome using PEIMax® (Polysciences) in serum-free OPTI-MEM® media. Cultures were supplemented with 10% CDM4HEK293 (HyClone) 3 hours post-transfection. Three days later, cultures were centrifuged at 1000 rpm for 10 minutes to separate the supernatant from the cell pellet. The supernatant was mixed with 40% PEG 2.5M NaCl (8% final concentration) and incubated on ice for at least 2 hours to precipitate AAV viral particles. The cell pellet, containing the majority of the AAV vectors, was resuspended in lysis media (0.15 M NaCl, 50 mM Tris HCl, 0.05% Tween, pH 8.5), sonicated on ice (15 seconds, 30% amplitude) and treated with Benzonase (250 U/μL, Novagen) for 30 minutes at 37° C. Crude lysate and PEG-treated supernatant were then centrifuged at 4000 rpm for 20 minutes at 4° C. to resuspend the PEG precipitated AAV (pellet) with cell debris-free crude lysate (supernatant), and then clarified further using a 0.45 μM filter.

[1044] To determine the viral genome titer, 1 μL from crude lysate containing viruses was digested with DNase and ProtK, followed by quantitative PCR. 5 μL of digested virus was used in a 25 μL qPCR reaction composed of IDT primetime master mix and a set of primer and 6′FAM/Zen/IBFQ probe (IDT) designed to amplify the CMV promoter region (Fwd 5′-CATCTACGTATTAGTCATCGCTATTACCA-3′ (SEQ ID NO: 456); Rev 5′-GAAATCCCCGTGAGTCAAACC-3′ (SEQ ID NO: 457), Probe 5′-TCAATGGGCGTGGATAG-3′; SEQ ID NO: 458) or a 62 nucleotide-fragment located in the AAV2-ITR (Fwd 5′-GGAACCCCTAGTGATGGAGTT-3′ (SEQ ID NO: 459); Rev 5′-CGGCCTCAGTGAGCGA-3′ (SEQ ID NO: 460), Probe 5′-CACTCCCTCTCTGCGCGCTCG-3′; SEQ ID NO: 461). Ten-fold serial dilutions (5 μl each of 2e+9 to 2e+4 DNA copies/mL) of an AAV ITR plasmid were used as reference standards to calculate the titer (viral genome (vg)/mL) of viral samples. The qPCR program was set up as: initial denaturation step at 95° C. for 5 minutes, followed by 40 cycles of denaturation at 95° C. for 1 min and annealing/extension at 60° C. for 1 min.

### AAV Transduction:

[1045] 10,000 cells/well of mNPCs were seeded on PLF-coated wells in 96-well plates 48-hours before AAV transduction. All viral infection conditions were performed in triplicate, with normalized number of vg among experimental vectors, in a series of 3-fold dilution of multiplicity of infection (MOI) ranging from about 1.0e+4 to 1.0e+6 vg/cell. Calculations were based on an estimated number of 20,000 cells per well at the time of transfection. Final volumes of 50 μL of AAV vectors diluted in pre-equilibrated mNPC medium supplemented with bFGF/EGF growth factors (20 ng/ml final concentration) were applied to each well. 48 hours post-transfection, a complete media change was performed with fresh media supplemented with growth factors. Editing activity (tdT+ cell quantification) was assessed by FACS 5 days post-transfection.

### Method for Assessing Activity by FACS:

[1046] Five days after transfection, treated tdTomato mNPCs in 96-well plates were washed with dPBS and treated with 50 μL TrypLE for 15 minutes. Following cell dissociation, treated wells were quenched with media containing DMEM, 10% FBS and 1× penicillin/streptomycin. Resuspended cells were transferred to round-bottom 96-well plates and centrifuged for 5 min at 1000×g. Cell pellets were then resuspended with dPBS containing 1×DAPI, and plates were loaded into an Attune™ NxT Flow Cytometer Autosampler. The Attune™ NxT flow cytometer was run using the following gating parameters: FSC-A×SSC-A to select cells, FSC-H×FSC-A to select single cells, FSC-A×VL1-A to select DAPI-negative alive cells, and FSC-A×YL1-A to select tdTomato positive cells.

### Results:

[1047] The results in graph in FIG. 2 show that CasX variant 491 and guide variant 174 with a spacer targeting the tdTomato stop cassette (spacer 12.7, with sequence CTGCATTCTAGTTGTGGTTT; SEQ ID NO: 462), when delivered by nucleofection of an AAV transgene plasmid, was able to edit the target stop cassette in mNPCs (measured by percentage of cells that are tdTom+ by FACS). Among the vectors tested, CasX 491.174 delivered in construct AAV.3 (with 80% tdTomato+ cells) outperformed the others. FIG. 3 shows that all three vectors tested achieved editing at the tdTomato locus in a dose-dependent manner. FIG. 4 shows results of editing using AAV construct 3 in an AAV vector, which demonstrated a dose-dependent response, achieving a high degree of editing.

[1048] The experiments demonstrate that small CRISPR proteins (such as CasX) and targeted guides can edit the genome when expressed from an AAV transgene plasmid or episome in vitro.

### Example 2: Packaging of Small CRISPR Systems within an AAV Vector

[1049] This experiment demonstrated that small CRISPR proteins (such as CasX) and gRNA can be encoded and efficiently packaged within an AAV vector.

### Materials and Methods

[1050] AAV vectors were generated using standard methods for AAV production, purification and characterization, as described in Example 1. For characterization, AAV viral genome titer was measured by qPCR, and the empty-full ratio was quantified using scanning transmission electron microscopy (STEM).

### Results:

[1051] The genomic DNA titer (by qPCR) for this AAV preparation was measured to be 6e12 vg/mL, and was generated from 1L of HEK293T cell culture. FIG. 5 is an image from a scanning transmission electron microscopy (STEM) micrograph showing that an estimated 90% of the particles in this AAV formulation contained viral genomes; i.e., were loaded with the CRISPR cargo. These results demonstrate that sequences encoding CasX variant proteins and gRNA can be efficiently packaged in an AAV vector, resulting in high titers and high packaging efficiency.

### Example 3: In Vivo Editing of a Genome with Small CRISPR Proteins Expressed from an AAV Episome

[1052] This experiment demonstrates that small CRISPR proteins (such as CasX) and gRNA are capable of being delivered by AAV and can edit the genome when expressed from an AAV episome in vivo.

### Materials and Methods

[1053] AAV vectors were generated using standard methods for AAV production, purification and characterization, as described in Example 1.

[1054] In vivo AAV administration and tissue processing:

[1055] P0-P1 pups from Ai9 mice were injected with AAV with a transgene encoding CasX variant 491 and guide variant 174 with spacer 12.7. Briefly, mice were cryo-anesthetized and 1-2 μL of AAV vector (˜1e11 viral genomes (vg)) was unilaterally injected into the intracerebroventricular (ICV) space using a Hamilton syringe (10 μL, Model 1701 RN SYR Cat No: 7653-01) fitted with a 33-gauge needle (small hub RN NDL—custom length 0.5 inches, point 4 (45 degrees)). Post-injection, pups recovered on a warm heating pad before being returned to their cages. 1 month after ICV injections, animals were terminally anesthetized with an intraperitoneal injection of ketamine/xylazine, and perfused transcardially with saline and fixative (4% paraformaldehyde). Brains were dissected and further post-fixed in 4% paraformaldehyde (PFA), followed by infiltration with 30% sucrose solution, and embedding in OCT compound. OCT-embedded brains were coronally sectioned using a cryostat. Sections were then mounted on slides, counter-stained with DAPI to label cell nuclei, coverslips were added, and the slides were imaged on a fluorescence microscope. Images were processed using ImageJ software and editing levels were quantified by counting the number of tdTom+ cells as a percentage of DAPI-labeled nuclei.

[1056] In a subsequent experiment to assess editing in peripheral tissues, particularly in the liver and in the heart, P0-P1 pups from Ai9 mice were cryo-anesthetized and were intravenously injected with ˜1e12 viral genomes (vg) of the same AAV construct in a 40 μL volume. Post-injection, pups recovered on a warm heating pad before being returned to their cages. 1-month post-administration, animals were terminally anesthetized and heart and liver tissues were necropsied and processed as described above.

### Results:

[1057] FIG. 6 provides comparative immunohistochemistry (IHC) images of brain tissue processed from an Ai9 mouse that received an ICV injection of AAV packaging CasX variant 491 and guide scaffold 174 with spacer 12.7. The tissue was stained with 4′,6-diamidino-2-phenylindole (top panel). The signal from cells in the tdTom channel indicates that the tdTom locus within these cells was successfully edited. The tdTom+ cells (in white) are distributed evenly across all regions of the brain, indicating that ICV-administered AAV carrying CasX, guide and spacer were able to reach and edit these cells as compared to a buffer control (bottom panel). The images are representative of those obtained from 3 mice for each group. Additionally, the results presented in FIG. 7A (liver) and FIG. 7B (heart) demonstrate that, under the conditions of the experiments, the AAV were able to distribute within the liver and the heart (edited cells in white) and edit the genome when expressed from single AAV episomes in vivo.

[1058] The results demonstrate that AAV encoding small CRISPR proteins (such as CasX) and a targeting guide can distribute within the tissues, when delivered either locally (brain) or systemically and edit the target genome when expressed from single AAV episomes in vivo.

### Example 4: Protein Promoter Selection Enhances AAV Vector Potency

[1059] This experiment demonstrated that small CRISPR protein expression and editing, can be enhanced by utilizing different promoters in an AAV construct for the encoded protein. Cargo space in the AAV transgene can be maximized with the use of short promoters in combination with small CRISPR proteins such as CasX. Additionally, these experiments demonstrate that expression can be enhanced with the use of promoters that would otherwise be too long to be efficiently packaged in AAV vector, if they were combined with larger CRISPR proteins, such as Cas9. The use of long, cell-type-specific promoters to enhance small CRISPR proteins is an advantage to the AAV system, and not possible in traditional CRISPR systems due to the size of traditional CRISPR proteins.

### Materials and Methods

[1060] Cloning and molecular biology methods were conducted as described in Example 1. Promoter variants (Table 10) were cloned upstream of CasX protein in an AAV-cis plasmid. The sequences of the additional components of the AAV constructs, with the exception of sequences encoding the CasX (Table 63) and the one or more gRNA (Table 26), are listed in Table 64.

TABLE 10
Promoter variant sequences

| AAV Construct | Promoter | Size | SEQ |
|---|---|---|---|
| ID | based on | (bp) | ID NO |
| 1, 2, 3, 7, 44 | CMV | 584 | 463 |
| 4 | UbC | 400 | 464 |
| 5 | EFS | 234 | 465 |
| 6 | CMV-s | 335 | 466 |
| 8 | CMVd1 | 100 | 467 |
| 9 | CMVd2 | 52 | 468 |
| 10 | miniCMV | 39 | 469 |
| 11, 26 | HSVTK | 146 | 470 |
| 12 | miniTK | 63 | 471 |
| 13 | miniIL2 | 114 | 472 |
| 14 | GRP94 | 710 | 473 |
| 15 | Supercore 1 | 81 | 474 |
| 16 | Supercore 2 | 81 | 475 |
| 17 | Supercore 3 | 81 | 476 |
| 18 | Mecp2 | 229 | 477 |
| 19 | CMVmini | 68 | 478 |
| 20 | CMVmini2 | 65 | 479 |
| 21 | miniCMVIE | 39 | 480 |
| 22 | adML | 81 | 481 |
| 23 | hepB | 107 | 482 |
| 54 | RSV | 227 | 483 |
| 55 | hSyn | 448 | 484 |
| 56 | SV40 | 330 | 485 |
| 57 | hPGK | 551 | 486 |
| 58 | JeT | 164 | 487 |
| 59 | JeT + UsP intron | 326 | 488 |
| 60 | hRLP30 | 325 | 489 |
| 61 | hRPS18 | 243 | 490 |
| 62 | CBA | 493 | 491 |
| 63 | CBH | 565 | 492 |
| 64 | CMV core | 204 | 493 |

### Method for Plasmid Nucleofection:

[1061] Immortalized neural progenitor cells were nucleofected as described in Example 1. Sequence-validated plasmids were diluted to concentrations of 200 ng/ul, 100 ng/ul, 50 ng/μL and 25 ng/μL, and 5 μL of each (1000 ng, 500 ng, 250 ng and 125 ng) were added to P3 solution containing 200,000 tdTomato mNPCs.

[1062] AAV viral production and characterization, and AAV transduction and editing level assessment in mNPTC-tdT cells by FACS were conducted as described in Example 1.

### Results:

[1063] The results shown in FIG. 8 demonstrate that several different promoters with CasX protein 438, scaffold variant 174 and spacer targeting the tdTomato stop cassette (spacer 12.7, with sequence CTGCATTCTAGTTGTGGTTT, SEQ ID NO: 462), when delivered by nucleofection of AAV transgene plasmid, were able to edit the target stop cassette in mNPCs at a dose of 1000 ng. These promoters ranged in length from over 700 nucleotides to as short as 81 nucleotides (Table 10, the promoters used correspond to the construct ID numbers in the left-most column). Among the promoters tested, constructs AAV7 (CMV promoter) and AAV14 (GRP94 promoter) showed considerable editing potency.

[1064] The results shown in FIG. 9 demonstrate that several short promoters combined with CasX variant 491, scaffold variant 174 and spacer 12.7, when delivered by nucleofection of AAV transgene plasmid, edit the target stop cassette in mNPCs at a dose of 500 ng. Other than construct AAV.2, which had a promoter of 584 nucleotides, all constructs had promoters that were less than 250 nucleotides in length. Among the protein promoters tested, construct AAV15 showed considerable editing potency, especially given its short length (81 nucleotides).

[1065] The results shown in FIG. 10 demonstrate that four promoters with CasX variant 491 and scaffold variant 174 with spacer 12.7, when delivered by nucleofection of AAV transgene plasmid, edit the target stop cassette in mNPCs at doses of 125 ng and 62.5 ng. Constructs AAV4, AAV5 and AAV6 have promoter lengths less than or equal to 400 nucleotides, and thus may maximize editing potency while minimizing AAV cargo capacity.

[1066] The results shown in FIG. 11 demonstrate that use of four promoter variants in the AAV also result in robust editing. Briefly, AAVs with transgene constructs AAV.3 (CMV), AAV.4 (UbC), AAV.5 (EFS) and AAV.6 (CMV-s) were generated. Each construct showed dose-dependent editing at the target locus (FIG. 11, left panel). At an MOI of 2e5, AAV.4 showed editing at 38%±3% at the target locus, outperforming the other constructs (FIG. 11, right panel).

[1067] In the experiments performed for the results portrayed in FIG. 12, several new protein promoters were compared against the top 4 protein promoter variants identified previously (AAV.3, AAV.4, AAV.5 and AAV.6). Briefly, AAVs were generated with corresponding transgene constructs indicated by the ID numbers in FIG. 12, and transduced in tdTomato mNPCs. At an MOI of 3e5, 5 days after transduction, multiple promoters displayed improved editing (FIG. 12). In particular, constructs AAV.58 (JeT) and AAV.59 (JeT+UsP intron) had editing activity above 30% while minimizing transgene size (see FIG. 13 for a summary). Constructs AAV.58 and AAV.59 contained promoters that are 420 and 258 bp smaller, respectively, than construct AAV.3, yet resulted in similar or improved editing of the target locus. In particular, inclusion of an intron in the promoter of construct AAV.59 led to increased editing compared to construct AAV.58, which lacked the intron, demonstrating that the inclusion of introns in the AAV construct promoters is beneficial.

[1068] The results demonstrate that expression of small CRISPR proteins (such as CasX) can be enhanced by utilizing long promoters that would otherwise be unusable in AAV constructs with traditional CRISPR proteins due to the size constraints of the AAV genome. Furthermore, combining short promoters with small CRISPR proteins (such as CasX) allows for significant reductions in AAV transgene cargo without compromising expression efficiency. This conservation of space allows for the inclusion of additional accessory elements, such as enhancers and regulatory elements in the transgene, which would enable increased editing potential.

### Example 5: Potency of Small CRISPR Systems is Enhanced by AAV RNA Promoter Choice

[1069] Experiments were performed to demonstrate that the editing potency of small CRISPR systems, such as CasX, can be enhanced if certain promoters are chosen for expression of the gRNA, which recognizes target DNA for editing, in an AAV vector. By using RNA promoters with different strengths, guide RNA expression can be modulated, which affects editing potency. The AAV platform based on the CasX system provides enough cargo space in the AAV to include at least 2 independent promoters for the expression of two incorporated guide RNAs. By combining different promoters, expression of multiple guide RNAs can be tuned within a single AAV transgene. Engineering shorter versions of RNA promoters that still retain editing potency also results in increased space in the vector for the inclusion of other accessory elements in the AAV transgene.

### Materials and Methods

[1070] The methods of Example 1 were used for cloning and quality control of the constructs, as well as for plasmid nucleofection and AAV production, transduction, and FACS analysis. The sequences of the Pol III promoters are presented in Table 11. The sequences of the additional components of AAV constructs, with the exception of sequences encoding the CasX (Table 63) and the one or more gRNA (Table 26), are listed in Table 64.

TABLE 11
Sequences of engineered Pol III promoters

| SEQ | AAV construct | Pol III | Promoter size |
|---|---|---|---|
| ID NO: | ID | promoter | (bp) |
| 661 | 3, 53, 157 | hU6 isoform 1 | 241 |
| 662 | 32, 158 | H1 | 215 |
| 496 | 33 | 7SK | 267 |
| 497 | 85/89 | hU6 variant 1 | 103 |
| 498 | 86 | hU6 variant 2 | 38 |
| 499 | 87 | hU6 variant 3 | 67 |
| 500 | 88 | hU6 variant 4 | 79 |
| 501 | 90 | hU6 variant 5 | 111 |
| 502 | 91 | hU6 variant 6 | 127 |
| 503 | 92 | hU6 variant 7 | 123 |
| 504 | 93 | hU6 variant 8 | 143 |
| 505 | 94 | hU6 variant 9 | 131 |
| 506 | 95 | hU6 variant 10 | 159 |
| 507 | 96 | hU6 variant 11 | 103 |
| 508 | 97 | hU6 variant 12 | 111 |
| 509 | 98 | hU6 variant 13 | 127 |
| 510 | 99 | hU6 variant 14 | 103 |
| 511 | 100 | hU6 variant 15 | 131 |
| 512 | 101 | hU6 variant 16 | 159 |
| 513 | 102 | hU6 variant 17 | 128 |
| 2688 | 159 | H1 core | 91 |
| 2689 | 160 | H1 core + 7SK hybrid 1 | 92 |
| 2690 | 161 | H1 core + 7SK hybrid 2 | 92 |
| 2691 | 162 | H1 core + 7SK hybrid 3 | 91 |
| 2692 | 163 | H1 core + 7SK hybrid 4 | 91 |
| 2693 | 164 | H1 core + 7SK hybrid 5 | 92 |
| 2694 | 165 | H1 core + 7SK hybrid 6 | 91 |
| 2695 | 166 | H1 core + 7SK hybrid 7 | 91 |
| 2696 | 167 | H1 core + 7SK hybrid 8 | 91 |
| 2697 | 168 | H1 core + 7SK hybrid 9 | 92 |
| 2698 | 169 | H1 core + U6 hybrid 1 | 91 |
| 2699 | 170 | H1 core + U6 hybrid 2 | 94 |
| 2700 | 171 | H1core + 7SK + U6 hybrid 1 | 92 |
| 2701 | 172 | H1 core + U6 hybrid 3 | 90 |
| 2702 | 173 | H1 core + 7SK + U6 hybrid 2 | 94 |
| 2703 | 174 | H1 core + 7SK + U6 hybrid 3 | 94 |
| 2704 | — | hU6 isoform 2 | 249 |
| 2705 | — | hU6 isoform 3 | 249 |
| 2706 | — | hU6 isoform 4 | 249 |
| 2707 | — | hU6 isoform 5 | 249 |
| 2708 | — | mU6 | 304 |
| 3996 | — | mU6 isoform | 314 |

### Results:

[1071] The results portrayed in FIG. 14 demonstrate that AAV vectors using three distinct RNA promoters, in combination with CasX protein 491, scaffold variant 174 and spacer 12.7, when delivered by nucleofection of the AAV transgene plasmid, edit the target stop cassette in mNPCs at doses of 250 ng and 125 ng. Constructs AAV3 (U6 promoter) and AAV32 (H1 promoter) have similar activity, editing at the target locus with 42% efficiency. Construct 33 (7SK promoter) shows ˜56% of the activity of constructs AAV3 and AAV32.

[1072] The results portrayed in FIG. 15 demonstrate that the same three distinct promoters, in combination with CasX protein 491, scaffold variant 174 and spacer 12.7, when delivered as AAV, edit the target stop cassette in mNPCs. AAV.3, AAV.32, AAV.33 were generated with transgene constructs 3, 32 and 33 respectively. Each vector displayed dose-dependent editing at the target locus (FIG. 15, left panel). At an MOI of 3e5, AAV.32 and AAV.33 had 50-60% of the potency of AAV.3 (FIG. 15, right panel).

[1073] The results shown in FIG. 16 demonstrate that constructs having one of four different truncations of the U6 promoter, in combination with CasX protein 491, scaffold variant 174 and spacer 12.7, when delivered by nucleofection of the AAV transgene plasmid, were each able to edit the target stop cassette at different levels in mNPCs at doses of 250 ng and 125 ng. Construct AAV85 (hU6 variant 1) had 33% of the potency of the base construct AAV53 (hU6), while constructs AAV86 (hU6 variant 2), AAV87 (hU6 variant 3) and AAV88 (hU6 variant 4) did not show any editing and were comparable to a non-targeting control.

[1074] FIG. 17 presents results of an experiment comparing editing in mNPCs between AAV generated with base construct AAV53 (hU6 promoter) to AAV generated with construct AAV85 (hU6 variant 1). When delivered as AAV, AAV.85 was able to edit at 7% compared to 15% for AAV.53 at an MOI of 3e5, consistent with the results from FIG. 16.

[1075] The results of FIG. 18 demonstrate that constructs with engineered U6 promoters were able to edit the target stop cassette at differential levels in mNPCs at doses of 250 ng and 125 ng. Engineered U6 promoters were designed to minimize the size of the promoter relative to the base U6 promoter. Construct AAV.53 carried the hU6 promoter, in combination with encoded CasX protein 491, scaffold variant 174 and spacer 12.7, and the constructs with the variant promoters carried the same CasX, scaffold and spacer as AAV.53. Constructs were delivered to mNPCs by nucleofection of AAV transgene plasmid, and were able to edit the target stop cassette at different levels in mNPCs at doses of 250 ng and 125 ng. One cluster of constructs (AAV.89 (hU6 variant 1), 90 (hU6 variant 5), 92 (hU6 variant 7), 93 (hU6 variant 8), 96 (hU6 variant 11), 97 (hU6 variant 12), 98 (hU6 variant 13), and 99 (hU6 variant 14)) all edited in the range of 15-20%, compared to 55% for construct AAV53. Other Pol III variants (constructs AAV94 (hU6 variant 9), 95 (hU6 variant 10) and 100 (hU6 variant 15)) all exhibited higher levels of editing at around 32% editing while construct 101 resulted in 48% editing. These promoters are all smaller than the Pol III promoter in the base construct AAV53, as shown in the scatterplot of FIG. 19, depicting transgene size of all AAV variants tested having engineered U6 RNA promoters on the X-axis vs. percent of mNPCs edited on the Y-axis.

[1076] The results depicted in FIG. 20 show that these constructs with engineered U6 promoters with CasX 491, scaffold variant 174, and spacer 12.7, when delivered as AAV, were able to edit the target stop cassette in mNPCs in a dose-dependent fashion. Variable rates of editing mediated by AAV with constructs AAV.94, AAV.95, AAV.100, and AAV.101 were seen, all editing at rates between the base construct AAV.53 and AAV.89, which has the same Pol III promoter as AAV.85 from FIG. 16.

[1077] The results depicted in FIG. 21 show that constructs with engineered U6 promoters combined with CasX protein 491, scaffold variant 174 and spacer 12.7, when delivered as AAV, were able to edit the target stop cassette in mNPCs. Variable rates of editing with AAV with constructs AAV.94, AAV.95, AAV.100, and AAV.101 were seen, all editing at rates between the base construct AAV.53 and AAV.89, which has the same Pol III promoter as AAV.85 from FIG. 16. FIG. 23 shows the results as a scatterplot of editing versus transgene size.

[1078] The results depicted in FIG. 22 demonstrate that AAV constructs with rationally engineered Pol III promoters, sequences encoding for CasX protein 491, and scaffold variant 174 with spacer 12.7, were able to edit the target tdTomato stop cassette at varying efficiencies when nucleofected as AAV transgene plasmids into mouse NPCs at doses 250 ng and 125 ng. Constructs 159 to 174 were designed to minimize the size of the promoter relative to the base U6 (construct ID 157) or H1 (construct ID 158) promoter, and constructs 160 to 174 were engineered as short, hybrid variants based on a core region of the H1 promoter (construct ID 159) with variations of domain swaps from 7SK and/or U6 promoters. The results of FIG. 22 show that most of these promoter variants, which are substantially shorter than the base U6 and H1 promoters, were able to function as Pol III promoters to drive sufficient gRNA transcription and editing at the tdTomato locus. Specifically, constructs 159, 161, 162, 165, and 167 were able to achieve at least 30% editing at the higher dose of 250 ng. These variants serve as promoter alternatives in AAV construct design that would permit significant reductions in AAV cargo capacity while driving adequate gRNA expression for targeted editing.

[1079] The results of these experiments demonstrate that expression of small CRISPR systems, such as CasX and gRNAs, can be modulated in various ways by utilizing alternative RNA promoters to express the gRNA. While most other CRISPR systems utilized in AAV do not have sufficient space in the transgene to include a separate promoter to express the gRNA, the CasX CRISPR system, and other systems with similarly small size, enable the use of multiple gRNA promoters of varying lengths within a single AAV transgene. These promoters can be used to differentially control expression and editing by the AAV transgene. The data also show that shorter versions of Pol III promoters can be engineered to retain their ability to facilitate transcription of functional guides. This increases the capacity of the AAV transgene to include additional promoters and/or accessory elements. Furthermore, adjusting other elements in this AAV transgene allows for the combination of multiple gRNA transcriptional units that could result in the following: 1) increased gRNA expression and thus CasX-mediated editing; or 2) driving the expression of more than one gRNA from a single AAV system, which would enable the ability to deliver CasX with a dual-gRNA system from a single AAV vector for targeted editing at different locations in the target nucleic acid (further discussed in Example 9).

### Example 6: Choice of Poly(A) Signal Enhances Potency of AAV Vectors

[1080] Experiments were conducted to demonstrate that small CRISPR proteins, such as CasX, can be expressed from an AAV genome utilizing a variety of polyadenylation (poly(A)) signals. Specifically, use of sequences encoding smaller CRISPR systems enable the inclusion of larger poly(A) signal sequences in the transgene of AAV vectors. In addition, experiments were conducted to demonstrate that the inclusion of shorter synthetic poly(A) signal sequences in the AAV constructs allows for further reductions in AAV transgene cargo capacity.

### Materials and Methods

[1081] AAV plasmid cloning: Poly(A) signal sequences were ordered as gene fragments and cloned into vector restriction sites according to standard techniques.

[1082] To generate the AAV plasmids assessed in the experiment data presented in FIG. 24 and FIG. 25, the methods of Example 1 were used for cloning and quality control of the constructs, as well as for plasmid nucleofection and FACS analysis. The sequences of the poly(A) signals are presented in Table 12. The sequences of the additional components of AAV constructs, with the exception of sequences encoding the CasX (Table 63) and the one or more gRNA (Table 26), are listed in Table 64.

TABLE 12
Poly(A) signal sequences

| AAV Construct | Poly(A) | Size | SEQ |
|---|---|---|---|
| ID | signal | (bp) | ID NO |
| 1, 3, 37, 232 | bGH | 208 | 514 |
| 24, 227 | hGH | 623 | 515 |
| 25, 228 | hGHshort | 477 | 516 |
| 26, 231 | HSVTK | 49 | 517 |
| 27, 221 | SynPolyA | 49 | 518 |
| 28, 226 | SV40 | 122 | 519 |
| 29 | SV40short | 82 | 520 |
| 30, 229 | bglob | 395 | 521 |
| 31, 230 | bglobshort | 56 | 522 |
| 34 | SV40polyA late (SL) | 181 | 523 |
| 222 | T7 Tphi | 119 | 3997 |
| 223 | CaMV | 175 | 3998 |
| 224 | RDH1 | 171 | 3999 |
| 225 | Sv40 polyA late | 241 | 4000 |

[1083] Methods for plasmid nucleofection and assessing activity by FACS were conducted as described in Example 1.

### Neuronal Cell Culture:

[1084] All neuronal cell culture was performed using N2B27-based media. To induce neuronal differentiation, iPSCs were plated in neuronal plating media (N2B27 base media with 1 μg/mL doxycycline, 200 μM L-ascorbic acid, 1 μM dibutyryl cAMP sodium salt, 10 μM CultureOne, 100 ng/ml of BDNF, 100 ng/ml of GDNF). iNs (induced neurons) were dissociated, aliquoted, and frozen for long term storage after three days of differentiation (DIV3). DIV3 iNs were thawed and seeded on a 96-well plate at ˜30,000-50,000 cells per well. iNs were cultured for one week in plating media and thereafter, half-media changes were performed once every week using feeding media (N2B27 base media with 200 μM L-ascorbic acid, 1 μM dibutyryl cAMP sodium salt, 200 ng/ml of BDNF, 200 ng/ml of GDNF).

### AAV Transduction of iNs In Vitro:

[1085] 24 hours prior to transduction, ˜30,000-50,000 iNs per well were seeded on Matrigel-coated 96-well plates. AAVs expressing the CasX:gRNA system, which included constructs encoding for poly(A) signal sequences listed in Table 12, were then diluted in neuronal plating media and added to cells. Cells were transduced at two MOIs (1E2 or 1E3 vg/cell). Seven days post-transduction, iNs were replenished using feeding media. Seven days post-transduction, cells were lifted using lysis buffer, 4-well replicates were pooled per experimental condition, and genomic DNA (gDNA) was harvested and prepared for editing analysis at the B2M locus using next generation sequencing (NGS).

### NGS Processing and Analysis:

[1086] Genomic DNA (gDNA) from harvested cells were extracted using the Zymo Quick-DNA™ Miniprep Plus kit following the manufacturer's instructions. Target amplicons were formed by amplifying regions of interest from 200 ng of extracted gDNA with a set of primers specific to the target locus, such as the human B2M gene. These gene-specific primers contained an additional sequence at the 5′ end to introduce an Illumina™ adapter and a 16-nucleotide unique molecule identifier. Amplified DNA products were purified with the Ampure XP DNA cleanup kit. Quality and quantification of the amplicon were assessed using a Fragment Analyzer DNA Analysis kit (Agilent, dsDNA 35-1500 bp). Amplicons were sequenced on the Illumina™ Miseq™ according to the manufacturer's instructions. Raw fastq files from sequencing were quality-controlled and processed using cutadapt v2.1, flash2 v2.2.00, and CRISPResso2 v2.0.29. Each sequence was quantified for containing an insertion or deletion (indel) relative to the reference sequence, in a window around the 3′ end of the spacer (30 bp window centered at −3 bp from 3′ end of spacer). CasX activity was quantified as the total percent of reads that contain insertions, substitutions, and/or deletions anywhere within this window for each sample.

### Cloning Poly(A) Library for High-Throughput Screen:

[1087] To identify poly(A) signals that enable CasX to be expressed in an AAV genome in a high-throughput manner, a massively parallel reporter assay was conducted. Briefly, 10,000 poly(A) constructs (1,000 unique poly(A) signal sequences×10 barcodes per poly(A) signal sequence) were amplified, digested, and ligated into a restriction enzyme-digested AAV plasmid backbone harboring sequences coding for CasX protein 491 and gRNA scaffold variant 235 with spacer 7.37 (GGCCGAGAUGUCUCGCUCCG; SEQ ID NO: 2709) targeting the endogenous B2M (beta-2-microglobulin) locus. The poly(A) signal sequences are provided in SEQ ID NOS: 2991-3991 of the accompanying sequence listing. Cloned AAV plasmids were then transformed into electrocompetent bacterial cells (MegaX DH10B T1^{R} Electrocomp™). Titer of poly(A) signal sequence library transformation was determined by counting E. coli colony-forming units (CFUs) from electroporated library MEGA-X Competent cells. After transformation and overnight growth in liquid cultures, the library was purified using the ZymoPURE™ Midiprep Kit. To determine adequate library coverage, barcoded amplicons were detected via PCR amplification followed by next generation sequencing (NGS) on the Illumina™ MiSeq™. Raw fastq files were processed using cutadapt v3.5, mapped using bowtie2 v9.3.0, and barcodes were extracted using custom software. Barcoded counts were normalized by total read counts to calculate the representation of each library member.

### AAV Vector Production:

[1088] AAV vectors were produced according to standard methods, which are described in Example 1.

[1089] To determine the viral genome (vg) titer, 1 μL from crude lysate viruses was digested with DNase and Proteinase K, followed by quantitative PCR. 5 μL of digested virus was used in a 25 μL qPCR reaction composed of IDT primetime master mix and a set of primer and 6′FAM/Zen/IBFQ probe (IDT) designed to amplify a 62 bp-fragment located in the AAV2-ITR. Ten-fold serial dilutions of an AAV ITR plasmid was used as reference standards to calculate the titer (vg/mL) of viral samples.

[1090] After production, AAVs from the pooled library were lysed to release AAV virion DNA, which was then purified according to standard methods. Barcoded amplicons were PCR-amplified from the viral DNA input, sequenced, and processed as described earlier to determine the coverage of the AAV pool. Barcode counts were normalized by total read counts to calculate an RPM value.

### AAV Transduction and Method for RNA Transcript Analysis:

[1091] 10,000 HEK293 Ts were seeded per well in PLF-coated 24-well plates 48 hours before AAV transduction. At time of transduction, HEK293 Ts were transduced with the pooled library of AAVs containing the library of poly(A) signal sequences. All viral infection conditions were performed in triplicate, with normalized number of vg among experimental vectors, at an MOI of 1E5 and 1E4 vg/cell. Two days post-transduction, total RNA was isolated and converted into cDNA by reverse transcription. Barcoded amplicons were PCR-amplified from the resulting cDNA, sequenced, and processed as described earlier. Barcode counts were normalized by total read counts to calculate an RPM value. To calculate the RNA abundance ratio for each poly(A) signal sequence from the library, normalized barcode counts from cDNA amplicons were divided by normalized barcode counts from viral DNA input. Poly(A) signal sequences with a high RNA abundance ratio, i.e., with the highest accumulation in HEK293 Ts, were identified as the poly(A) signal sequences of interest for further CasX editing assessments in vitro or in vivo.

### Results:

[1092] The results portrayed in FIG. 24 demonstrate that AAV constructs with several alternative poly(A) signals, in combination with CasX variant 491, scaffold variant 174 and spacer 12.7, when delivered by nucleofection of AAV transgene plasmid, were able to edit the target stop cassette in mNPCs at doses of 250 ng and 125 ng. Construct AAV3 (bGH poly(A)) showed the highest potency out of the three constructs tested in this experiment, editing the target locus at 60% efficiency (250 ng dose). Constructs 28 (SV40) and 29 (SV40 short), which have poly(A) signal sequences that are 59% and 39% of the size of the poly(A) signal sequence of construct 3, respectively (see Table 13), edited at 21% and 24% respectively (250 ng dose).

TABLE 13
Poly(A) construct variants

| AAV Construct | Poly(A) Signal Size | AAV Transgene Size |
|---|---|---|
| ID | (bp) | (bp) |
| 3 | 208 | 4550 |
| 25 | 477 | 4795 |
| 26 | 49 | 4367 |
| 27 | 49 | 4367 |
| 28 | 122 | 4440 |
| 29 | 82 | 4400 |
| 30 | 395 | 4713 |
| 31 | 56 | 4374 |
| 34 | 181 | 4565 |
| 37 | 208 | 4619 |

[1093] The results portrayed in FIG. 25 demonstrate that the two different poly(A) signals, combined with CasX protein 491, scaffold variant 174 and spacer 12.7, when delivered as an AAV vector, were able to edit the target stop cassette in mNPCs. AAV.34 and AAV.37 were generated with transgene constructs 34 (with a poly(A) signal of 186 nucleotides and a total transgene length of 4565 nucleotides) and 37 (with a poly(A) signal of 208 nucleotides and a total transgene length of 4619 nucleotides), respectively. Each vector displayed dose-dependent editing at the target locus, and AAV.34, which contains a shorter poly(A) signal, had approximately 75% of the editing potency of AAV.37 for both doses.

[1094] The results portrayed in FIGS. 135A-135B demonstrate that use of AAV constructs containing the SV40 poly(A) late poly(A) signal (construct ID 225) resulted in improved editing compared to that when using constructs with other poly(A) signals. Furthermore, multiple constructs containing poly(A) signals less than 70 bp contained high activity. Each vector displayed dose-dependent editing at the target locus.

[1095] Experiments were performed in HEK293T cells to screen for poly(A) signal sequences for incorporation into future AAV construct designs that would improve CasX expression. As described above, poly(A) signal sequences with a high RNA abundance ratio would be identified as the poly(A) signal sequences of interest for further testing. The RNA abundance ratio was calculated across ten technical replicates by summing the counts across technical replicates and plotted for each unique poly(A) signal sequence from the library for each biological replicate (FIG. 91). Approximately 42% of poly(A) signal sequences screened demonstrated a positive RNA abundance ratio in any of the three biological replicates assessed, indicating that use of these poly(A) signal sequences resulted in higher CasX expression. Here, the bGH poly(A) signal sequence served as a positive control and is annotated in FIG. 91. The mean RNA abundance ratio was also calculated and plotted against the sequence length for each poly(A) signal candidate (data not shown). It was determined that approximately 71% of the poly(A) signal sequences with a positive RNA abundance ratio in any of the three biological replicates also have a sequence length shorter than the sequence of the bGH control (109 bp) from start of the sequence to polyadenylation site. A list of poly(A) signal sequences with a positive mean RNA abundance ratio across all three biological replicates and with a sequence length shorter than bGH across all three biological replicates is presented in SEQ ID NOS: 2710-2859 as set forth in Table 14. These identified poly(A) signal sequences, as well as sequences listed in Table 15, will be incorporated in future AAV construct designs for further assessment in vitro or in vivo. These findings support use of the unique poly(A) signal sequences in designing AAV vectors that would provide additional flexibility for increased AAV transgene cargo capacity while potentially enhancing CasX expression and editing efficiency.

[1096] Overall, the results demonstrate that the expression of small CRISPR proteins, such as CasX, can be modulated by poly(A) signals of varying lengths. Longer poly(A) signal sequences can be utilized in the siAAV constructs for enhanced CasX activity, while shorter poly(A) signal sequences can be utilized in the siAAV constructs to make more sequence space available for the inclusion of additional accessory elements within the siAAV transgene.

TABLE 14
List of poly(A) signals identified with a positive mean RNA abundance
ratio and sequence length shorter than bGH control (109 bp)

| Name | SEQ ID NO: | Poly(A) ID |
|---|---|---|
| SPATA24 | 2710 | Poly(A)_812 |
| C14orf28 | 2711 | Poly(A)_269 |
| TSKS | 2712 | Poly(A)_554 |
| NUP153 | 2713 | Poly(A)_833 |
| RPS12 | 2714 | Poly(A)_862 |
| IL17RC | 2715 | Poly(A)_709 |
| CALM2 | 2716 | Poly(A)_594 |
| KLK13 | 2717 | Poly(A)_562 |
| STPG4 | 2718 | Poly(A)_593 |
| RNF181 | 2719 | Poly(A)_612 |
| SPAG4 | 2720 | Poly(A)_663 |
| RHOT2 | 2721 | Poly(A)_306 |
| GLG1 | 2722 | Poly(A)_359 |
| ACTA2 | 2723 | Poly(A)_105 |
| SMPD2 | 2724 | Poly(A)_859 |
| MRPL52 | 2725 | Poly(A)_254 |
| ETV2 | 2726 | Poly(A)_499 |
| TMEM102 | 2727 | Poly(A)_383 |
| CLCNKB | 2728 | Poly(A)_13 |
| AAAS | 2729 | Poly(A)_203 |
| SPATA7 | 2730 | Poly(A)_273 |
| FKBP11 | 2731 | Poly(A)_200 |
| NOP16 | 2732 | Poly(A)_821 |
| CDC34 | 2733 | Poly(A)_450 |
| NLRX1 | 2734 | Poly(A)_188 |
| PRPF8 | 2735 | Poly(A)_370 |
| EIF3K | 2736 | Poly(A)_508 |
| KRTCAP2 | 2737 | Poly(A)_71 |
| RPS15 | 2738 | Poly(A)_455 |
| ELOC | 2739 | Poly(A)_911 |
| TFPT | 2740 | Poly(A)_568 |
| CEP350 | 2741 | Poly(A)_86 |
| RAB33A | 2742 | Poly(A)_993 |
| WDR36 | 2743 | Poly(A)_808 |
| ARMC12 | 2744 | Poly(A)_846 |
| NNMT | 2745 | Poly(A)_184 |
| NAA50 | 2746 | Poly(A)_744 |
| RPL14 | 2747 | Poly(A)_716 |
| RPL18 | 2748 | Poly(A)_537 |
| TMEM205 | 2749 | Poly(A)_474 |
| CCDC180 | 2750 | Poly(A)_946 |
| KCNJ13 | 2751 | Poly(A)_645 |
| SCO2 | 2752 | Poly(A)_707 |
| TUT1 | 2753 | Poly(A)_145 |
| PTH2 | 2754 | Poly(A)_543 |
| THOC1 | 2755 | Poly(A)_442 |
| ACKR1 | 2756 | Poly(A)_76 |
| RPL38 | 2757 | Poly(A)_429 |
| SAMD8 | 2758 | Poly(A)_102 |
| RPS8 | 2759 | Poly(A)_33 |
| SCNM1 | 2760 | Poly(A)_55 |
| HEXDC | 2761 | Poly(A)_441 |
| EXOSC4 | 2762 | Poly(A)_931 |
| IDH3B | 2763 | Poly(A)_652 |
| UBE2D2 | 2764 | Poly(A)_813 |
| CBR3 | 2765 | Poly(A)_678 |
| GPR19 | 2766 | Poly(A)_195 |
| ALKBH7 | 2767 | Poly(A)_462 |
| UBE2D3 | 2768 | Poly(A)_782 |
| SUPV3L1 | 2769 | Poly(A)_99 |
| SENP3 | 2770 | Poly(A)_384 |
| RNF166 | 2771 | Poly(A)_366 |
| EEF1D | 2772 | Poly(A)_927 |
| TEKT1 | 2773 | Poly(A)_380 |
| PSTK | 2774 | Poly(A)_115 |
| RETREG1 | 2775 | Poly(A)_792 |
| RPL7 | 2776 | Poly(A)_910 |
| SLIT2 | 2777 | Poly(A)_775 |
| CALHM6 | 2778 | Poly(A)_861 |
| C1orf53 | 2779 | Poly(A)_87 |
| AURKAIP1 | 2780 | Poly(A)_3 |
| EEF1D | 2781 | Poly(A)_928 |
| CRYGD | 2782 | Poly(A)_636 |
| MSRB3 | 2783 | Poly(A)_215 |
| ABHD1 | 2784 | Poly(A)_584 |
| HCCS | 2785 | Poly(A)_972 |
| POLD1 | 2786 | Poly(A)_558 |
| ZBTB48 | 2787 | Poly(A)_7 |
| UBC | 2788 | Poly(A)_233 |
| MRPL52 | 2789 | Poly(A)_253 |
| CORO7-PAM16 | 2790 | Poly(A)_321 |
| DPM3 | 2791 | Poly(A)_70 |
| RPS9 | 2792 | Poly(A)_570 |
| SYCE1L | 2793 | Poly(A)_362 |
| AKAP8L | 2794 | Poly(A)_479 |
| DHX30 | 2795 | Poly(A)_719 |
| RABGGTA | 2796 | Poly(A)_265 |
| RNF181 | 2797 | Poly(A)_611 |
| PPP1R35 | 2798 | Poly(A)_881 |
| RRP9 | 2799 | Poly(A)_735 |
| VPS29 | 2800 | Poly(A)_225 |
| NUP85 | 2801 | Poly(A)_431 |
| EXOC3L1 | 2802 | Poly(A)_347 |
| TAF10 | 2803 | Poly(A)_126 |
| PPP1R13L | 2804 | Poly(A)_531 |
| POLB | 2805 | Poly(A)_907 |
| INTS8 | 2806 | Poly(A)_916 |
| PLA2G1B | 2807 | Poly(A)_229 |
| ZFAND5 | 2808 | Poly(A)_945 |
| RPL30 | 2809 | Poly(A)_918 |
| SGF29 | 2810 | Poly(A)_329 |
| NUDT14 | 2811 | Poly(A)_279 |
| IFT122 | 2812 | Poly(A)_751 |
| CUTA | 2813 | Poly(A)_842 |
| FBL | 2814 | Poly(A)_516 |
| ZCRB1 | 2815 | Poly(A)_197 |
| C2orf70 | 2816 | Poly(A)_583 |
| CCDC33 | 2817 | Poly(A)_291 |
| MPHOSPH10 | 2818 | Poly(A)_603 |
| BAG6 | 2819 | Poly(A)_836 |
| C11orf80 | 2820 | Poly(A)_167 |
| PPIL6 | 2821 | Poly(A)_858 |
| SNRNP27 | 2822 | Poly(A)_600 |
| NUP93 | 2823 | Poly(A)_339 |
| C17orf98 | 2824 | Poly(A)_405 |
| ATRIP | 2825 | Poly(A)_721 |
| TRO | 2826 | Poly(A)_983 |
| U2AF1L4 | 2827 | Poly(A)_502 |
| PRIM1 | 2828 | Poly(A)_211 |
| S100A2 | 2829 | Poly(A)_65 |
| PRKAA1 | 2830 | Poly(A)_794 |
| CPVL | 2831 | Poly(A)_870 |
| PIP | 2832 | Poly(A)_896 |
| MAPKAPK5 | 2833 | Poly(A)_227 |
| IL13RA2 | 2834 | Poly(A)_988 |
| C2orf70 | 2835 | Poly(A)_582 |
| TMEM219 | 2836 | Poly(A)_331 |
| EXOSC8 | 2837 | Poly(A)_238 |
| CUTA | 2838 | Poly(A)_843 |
| PLCB2 | 2839 | Poly(A)_282 |
| PCGF1 | 2840 | Poly(A)_608 |
| PFDN5 | 2841 | Poly(A)_201 |
| IFT27 | 2842 | Poly(A)_697 |
| VMA21 | 2843 | Poly(A)_994 |
| PSMB1 | 2844 | Poly(A)_864 |
| EEF1D | 2845 | Poly(A)_929 |
| ARMC3 | 2846 | Poly(A)_98 |
| AP1M1 | 2847 | Poly(A)_480 |
| BOLA3 | 2848 | Poly(A)_604 |
| TMEM258 | 2849 | Poly(A)_143 |
| TCTEX1D2 | 2850 | Poly(A)_764 |
| ALAS1 | 2851 | Poly(A)_737 |
| AKAP14 | 2852 | Poly(A)_991 |
| TEX10 | 2853 | Poly(A)_947 |
| CTNNBL1 | 2854 | Poly(A)_665 |
| UBL5 | 2855 | Poly(A)_472 |
| FGF21 | 2856 | Poly(A)_540 |
| PPP2R3C | 2857 | Poly(A)_268 |
| SEPT11 | 2858 | Poly(A)_778 |
| DNLZ | 2859 | Poly(A)_963 |

TABLE 15
List of additional poly(A) signals for incorporation
into AAV construct designs

| Name | Poly(A) ID | SEQ ID NO: |
|---|---|---|
| RPL10 | Poly(A)_1000 | 4110 |
| RPL11 | Poly(A)_16 | 4111 |
| RPL12 | Poly(A)_952 | 4112 |
| RPL13A | Poly(A)_546 | 4113 |
| RPL22 | Poly(A)_6 | 4114 |
| RPL22L1 | Poly(A)_757 | 4115 |
| RPL26 | Poly(A)_390 | 4116 |
| RPL26 | Poly(A)_391 | 4117 |
| RPL26 | Poly(A)_392 | 4118 |
| RPL27A | Poly(A)_127 | 4119 |
| RPL3 | Poly(A)_700 | 4120 |
| RPL30 | Poly(A)_919 | 4121 |
| RPL32 | Poly(A)_713 | 4122 |
| RPL35A | Poly(A)_765 | 4123 |
| RPL35A | Poly(A)_766 | 4124 |
| RPL5 | Poly(A)_43 | 4125 |
| RPL8 | Poly(A)_935 | 4126 |
| RPS11 | Poly(A)_547 | 4127 |
| RPS15A | Poly(A)_326 | 4128 |
| RPS16 | Poly(A)_513 | 4129 |
| RPS16 | Poly(A)_514 | 4130 |
| RPS19 | Poly(A)_521 | 4131 |
| RPS3A | Poly(A)_786 | 4132 |
| RPS5 | Poly(A)_574 | 4133 |
| RPS7 | Poly(A)_578 | 4134 |

### Example 7: Positions of Regulatory Elements Modulate Small CRISPR Protein Potency in AAV Vectors

[1097] Orientation (forward or reverse) and position (upstream or downstream of CRISPR gene) of regulatory elements such as the gRNA promoter and guide scaffold complex can modulate the underlying expression of the small CRISPR protein and the overall editing efficiency of CRISPR systems in AAV vectors. Experiments were performed to assess the best orientation and position of regulatory elements within the AAV genome to enhance the potency of small CRISPR proteins and guide RNAs.

### Materials and Methods:

[1098] AAV vector production and QC, nucleofection, AAV viral production and editing level assessment in mNPTC-tdT cells by FACS were conducted as described in Example 1.

### Results:

[1099] Construct AAV44 (configuration shown in FIG. 26, second from top) contains a Pol III promoter driving expression of guide scaffold 174 and spacer 12.7 in the reverse orientation of construct AAV.3 (top configuration in FIG. 26). The results depicted in FIG. 27 demonstrate that construct AAV44, when delivered by nucleofection of an AAV transgene plasmid, modifies the target stop cassette in mNPCs similarly to construct AAV3 at in a dose-dependent manner.

[1100] The results depicted in FIG. 28 show that construct AAV44, when delivered as an AAV vector, edits the target stop cassette in mNPCs, further supporting the utility of this construct. AAV.3 and AAV.44 were generated with transgene constructs AAV3 and AAV44, respectively. Each vector displayed dose-dependent editing at the target locus (FIG. 28, left panel, in which the vector was assayed using 3-fold dilutions). FIG. 28, right panel, shows editing results at an MOI of 3×10⁵, in which AAV.44 had 60% of the editing potency of the original configuration of vector AAV.3.

[1101] Additional configurations were explored, such that the gRNA transcriptional unit (Pol III U6 promoter driving the expression of the gRNA scaffold and indicated spacer) was placed either upstream or downstream of the CasX gene and was either in the forward or reverse orientation (FIG. 104). Table 16 lists the sequences of key AAV elements with varying positions and orientations of the gRNA promoter to drive gRNA expression (full AAV transgene sequences within ITRs are in Table 17. The resulting AAV constructs were used to produce AAVs, which were used to transduce mNPCs to assess editing level at the tdTomato locus. The results of this experiment are illustrated in FIG. 105. The data demonstrate that AAVs produced from Constructs 207B, 209B, and 210 were able to induce similar levels of editing at the tdTomato locus in a dose-dependent manner. Meanwhile, the configuration used in Construct 208, where the U6-sgRNA transcriptional unit was in the reverse orientation downstream of the CasX gene, appeared to adversely affect gene editing rate at the target locus.

TABLE 16
Sequences of key AAV elements with varying positions and orientations of the
gRNA transcriptional unit.

| AAV | Key Component | DNA | SEQ ID |
|---|---|---|---|
| Construct ID | Name | Sequence | NO: |
| 207A/B, 208, | 5′ ITR | CCTGCAGGCAGCTGCGCGCTCGCTCGCTCACTGAGGCC | 423 |
| 209A/B, 210 | | GCCCGGGCGTCGGGCGACCTTTGGTCGCCCGGCCTCAG | |
| | | TGAGCGAGCGAGCGCGCAGAGAGGGAGTGGCCAACTCC | |
| | | ATCACTAGGGGTTCCT | |
| | UbC promoter | GGCCTCCGCGCCGGGTTTTGGCGCCTCCCGCGGGCGCC | 464 |
| | | CCCCTCCTCACGGCGAGCGCTGCCACGTCAGACGAAGG | |
| | | GCGCAGCGAGCGTCCTGATCCTTCCGCCCGGACGCTCA | |
| | | GGACAGCGGCCCGCTGCTCATAAGACTCGGCCTTAGAA | |
| | | CCCCAGTATCAGCAGAAGGACATTTTAGGACGGGACTT | |
| | | GGGTGACTCTAGGGCACTGGTTTTCTTTCCAGAGAGCG | |
| | | GAACAGGCGAGGAAAAGTAGTCCCTTCTCGGCGATTCT | |
| | | GCGGAGGGATCTCCGTGGGGCGGTGAACGCCGATGATT | |
| | | ATATAAGGACGCGCCGGGTGTGGCACAGCTAGTTCCGT | |
| | | CGCAGCCGGGATTTGGGTCGCGGTTCTTGTTTGTGGAT | |
| | | CGCTGTGATCGTCACTTGGT | |
| | 5′ c-MYC NLS | CCAGCGGCCAAACGGGTGAAGCTGGAC | 838 |
| | CasX 491 | CAAGAGATCAAGAGAATCAACAAGATCAGAAGGAGACT | 791 |
| | | GGTCAAGGACAGCAACACAAAGAAGGCCGGCAAGACAG | |
| | | GCCCCATGAAAACCCTGCTCGTCAGAGTGATGACCCCT | |
| | | GACCTGAGAGAGCGGCTGGAAAACCTGAGAAAGAAGCC | |
| | | CGAGAACATCCCTCAGCCTATCAGCAACACCAGCAGGG | |
| | | CCAACCTGAACAAGCTGCTGACCGACTACACCGAGATG | |
| | | AAGAAAGCCATCCTGCACGTGTACTGGGAAGAGTTCCA | |
| | | GAAAGACCCCGTGGGCCTGATGAGCAGAGTTGCTCAGC | |
| | | CTGCCAGCAAGAAGATCGACCAGAACAAGCTGAAGCCC | |
| | | GAGATGGACGAGAAGGGCAATCTGACCACAGCCGGCTT | |
| | | TGCCTGCTCTCAGTGTGGCCAGCCTCTGTTCGTGTACA | |
| | | AGCTGGAACAGGTGTCCGAGAAAGGCAAGGCCTACACC | |
| | | AACTACTTCGGCAGATGTAACGTGGCCGAGCACGAGAA | |
| | | GCTGATTCTGCTGGCCCAGCTGAAACCTGAGAAGGACT | |
| | | CTGATGAGGCCGTGACCTACAGCCTGGGCAAGTTTGGA | |
| | | CAGAGAGCCCTGGACTTCTACAGCATCCACGTGACCAA | |
| | | AGAAAGCACACACCCCGTGAAGCCCCTGGCTCAGATCG | |
| | | CCGGCAATAGATACGCCTCTGGACCTGTGGGCAAAGCC | |
| | | CTGTCCGATGCCTGCATGGGAACAATCGCCAGCTTCCT | |
| | | GAGCAAGTACCAGGACATCATCATCGAGCACCAGAAGG | |
| | | TGGTCAAGGGCAACCAGAAGAGACTGGAAAGCCTGAGG | |
| | | GAGCTGGCCGGCAAAGAGAACCTGGAATACCCCAGCGT | |
| | | GACCCTGCCTCCTCAGCCTCACACAAAAGAAGGCGTGG | |
| | | ACGCCTACAACGAAGTGATCGCCAGAGTGAGAATGTGG | |
| | | GTCAACCTGAACCTGTGGCAGAAGCTGAAACTGTCCAG | |
| | | GGACGACGCCAAGCCTCTGCTGAGACTGAAGGGCTTCC | |
| | | CTAGCTTCCCTCTGGTGGAAAGACAGGCCAATGAAGTG | |
| | | GATTGGTGGGACATGGTCTGCAACGTGAAGAAGCTGAT | |
| | | CAACGAGAAGAAAGAGGATGGCAAGGTTTTCTGGCAGA | |
| | | ACCTGGCCGGCTACAAGAGACAAGAAGCCCTGAGGCCT | |
| | | TACCTGAGCAGCGAAGAGGACCGGAAGAAGGGCAAGAA | |
| | | GTTCGCCAGATACCAGCTGGGCGACCTGCTGCTGCACC | |
| | | TGGAAAAGAAGCACGGCGAGGACTGGGGCAAAGTGTAC | |
| | | GATGAGGCCTGGGAGAGAATCGACAAGAAGGTGGAAGG | |
| | | CCTGAGCAAGCACATTAAGCTGGAAGAGGAAAGAAGGA | |
| | | GCGAGGACGCCCAATCTAAAGCCGCTCTGACCGATTGG | |
| | | CTGAGAGCCAAGGCCAGCTTTGTGATCGAGGGCCTGAA | |
| | | AGAGGCCGACAAGGACGAGTTCTGCAGATGCGAGCTGA | |
| | | AGCTGCAGAAGTGGTACGGCGATCTGAGAGGCAAGCCC | |
| | | TTCGCCATTGAGGCCGAGAACAGCATCCTGGACATCAG | |
| | | CGGCTTCAGCAAGCAGTACAACTGCGCCTTCATTTGGC | |
| | | AGAAAGACGGCGTCAAGAAACTGAACCTGTACCTGATC | |
| | | ATCAATTACTTCAAAGGCGGCAAGCTGCGGTTCAAGAA | |
| | | GATCAAACCCGAGGCCTTCGAGGCTAACAGATTCTACA | |
| | | CCGTGATCAACAAAAAGTCCGGCGAGATCGTGCCCATG | |
| | | GAAGTGAACTTCAACTTCGACGACCCCAACCTGATTAT | |
| | | CCTGCCTCTGGCCTTCGGCAAGAGACAGGGCAGAGAGT | |
| | | TCATCTGGAACGATCTGCTGAGCCTGGAAACCGGCTCT | |
| | | CTGAAGCTGGCCAATGGCAGAGTGATCGAGAAAACCCT | |
| | | GTACAACAGGAGAACCAGACAGGACGAGCCTGCTCTGT | |
| | | TTGTGGCCCTGACCTTCGAGAGAAGAGAGGTGCTGGAC | |
| | | AGCAGCAACATCAAGCCCATGAACCTGATCGGCGTGGA | |
| | | CCGGGGCGAGAATATCCCTGCTGTGATCGCCCTGACAG | |
| | | ACCCTGAAGGATGCCCACTGAGCAGATTCAAGGACTCC | |
| | | CTGGGCAACCCTACACACATCCTGAGAATCGGCGAGAG | |
| | | CTACAAAGAGAAGCAGAGGACAATCCAGGCCAAGAAAG | |
| | | AGGTGGAACAGCGCAGAGCCGGCGGATACTCTAGGAAG | |
| | | TACGCCAGCAAGGCCAAGAATCTGGCCGACGACATGGT | |
| | | CCGAAACACCGCCAGAGATCTGCTGTACTACGCCGTGA | |
| | | CACAGGACGCCATGCTGATCTTCGAGAATCTGAGCAGA | |
| | | GGCTTCGGCCGGCAGGGCAAGAGAACCTTTATGGCCGA | |
| | | GAGGCAGTACACCAGAATGGAAGATTGGCTCACAGCTA | |
| | | AACTGGCCTACGAGGGACTGAGCAAGACCTACCTGTCC | |
| | | AAAACACTGGCCCAGTATACCTCCAAGACCTGCAGCAA | |
| | | TTGCGGCTTCACCATCACCAGCGCCGACTACGACAGAG | |
| | | TGCTGGAAAAGCTCAAGAAAACCGCCACCGGCTGGATG | |
| | | ACCACCATCAACGGCAAAGAGCTGAAGGTTGAGGGCCA | |
| | | GATCACCTACTACAACAGGTACAAGAGGCAGAACGTCG | |
| | | TGAAGGATCTGAGCGTGGAACTGGACAGACTGAGCGAA | |
| | | GAGAGCGTGAACAACGACATCAGCAGCTGGACAAAGGG | |
| | | CAGATCAGGCGAGGCTCTGAGCCTGCTGAAGAAGAGGT | |
| | | TTAGCCACAGACCTGTGCAAGAGAAGTTCGTGTGCCTG | |
| | | AACTGCGGCTTCGAGACACACGCCGATGAACAGGCTGC | |
| | | CCTGAACATTGCCAGAAGCTGGCTGTTCCTGAGAAGCC | |
| | | AAGAGTACAAGAAGTACCAGACCAACAAGACCACCGGC | |
| | | AACACCGACAAGAGGGCCTTTGTGGAAACCTGGCAGAG | |
| | | CTTCTACAGAAAAAAGCTGAAAGAAGTCTGGAAGCCCG | |
| | | CCGTG | |
| | 3′ c-MYC NLS | CCCGCCGCGAAGCGAGTGAAACTGGAC | 839 |
| | bGH poly(A) | CTGTGCCTTCTAGTTGCCAGCCATCTGTTGTTTGCCCC | 514 |
| | signal | TCCCCCGTGCCTTCCTTGACCCTGGAAGGTGCCACTCC | |
| | | CACTGTCCTTTCCTAATAAAATGAGGAAATTGCATCGC | |
| | | ATTGTCTGAGTAGGTGTCATTCTATTCTGGGGGGTGGG | |
| | | GTGGGGCAGGACAGCAAGGGGGAGGATTGGGAAGAGAA | |
| | | TAGCAGGCATGCTGGGGA | |
| 207A/B, | U6 promoter | GAGGGCCTATTTCCCATGATTCCTTCATATTTGCATAT | 661 |
| 209A/B | (Fwd) | ACGATACAAGGCTGTTAGAGAGATAATTGGAATTAATT | |
| | | TGACTGTAAACACAAAGATATTAGTACAAAATACGTGA | |
| | | CGTAGAAAGTAATAATTTCTTGGGTAGTTTGCAGTTTT | |
| | | AAAATTATGTTTTAAAATGGACTATCATATGCTTACCG | |
| | | TAACTTGAAAGTATTTCGATTTCTTGGCTTTATATATC | |
| | | TTGTGGAAAGGAC | |
| | Scaffold 235 | ACTGGCGCTTCTATCTGATTACTCTGAGCGCCATCACC | 698 |
| | (Fwd) | AGCGACTATGTCGTAGTGGGTAAAGCCGCTTACGGACT | |
| | | TCGGTCCGTAAGAGGCATCAGAG | |
| 207B, 209B | Spacer 12.7 | CTGCATTCTAGTTGTGGTTT | 462 |
| | (Fwd) | | |
| 207A, 209A | Spacer NT (Fwd) | GGGTCTTCGAGAAGACCC | 537 |
| 208, 210 | U6 promoter | GTCCTTTCCACAAGATATATAAAGCCAAGAAATCGAAA | 4001 |
| | (Rev Comp) | TACTTTCAAGTTACGGTAAGCATATGATAGTCCATTTT | |
| | | AAAACATAATTTTAAAACTGCAAACTACCCAAGAAATT | |
| | | ATTACTTTCTACGTCACGTATTTTGTACTAATATCTTT | |
| | | GTGTTTACAGTCAAATTAATTCCAATTATCTCTCTAAC | |
| | | AGCCTTGTATCGTATATGCAAATATGAAGGAATCATGG | |
| | | GAAATAGGCCCTC | |
| | Scaffold 235 | CTCTGATGCCTCTTACGGACCGAAGTCCGTAAGCGGCT | 4002 |
| | (Rev Comp) | TTACCCACTACGACATAGTCGCTGGTGATGGCGCTCAG | |
| | | AGTAATCAGATAGAAGCGCCAGT | |
| | Spacer 12.7 | AAACCACAACTAGAATGCAG | 4003 |
| | (Rev Comp) | | |
| | 3′ ITR | AGGAACCCCTAGTGATGGAGTTGGCCACTCCCTCTCTG | 424 |
| | | CGCGCTCGCTCGCTCACTGAGGCCGGGCGACCAAAGGT | |
| | | CGCCCGACGCCCGGGCTTTGCCCGGGCGGCCTCAGTGA | |
| | | GCGAGCGAGCGCGCAGCTGCCTGCAGG | |

TABLE 17
Sequences of AAV constructs within the AAV ITRs.

| Construct ID | SEQUENCE WITHIN AAV ITR (SEQ ID NO) |
|---|---|
| 207A | 4135 |
| 207B | 4136 |
| 208 | 4137 |
| 209A | 4138 |
| 209B | 4139 |
| 210 | 4140 |

[1102] The results of these experiments demonstrate that the orientation of parts within the AAV genome can be varied, yet result in sufficient expression of the CRISPR proteins and the guide RNA. This shows that specific orientations or positions of the regulatory elements relative to the encoded protein or RNA components may allow controlled modulation of expression in CasX-packaging siAAV constructs that contain one or multiple guides.

### Example 8: Small CRISPR Protein Potency is Enhanced by Inclusion of Additional Regulatory Elements in the AAV Vector that are not Possible a Larger Protein

[1103] These experiments demonstrated that transcriptional levels mediated by AAV vectors delivering small CRISPR proteins (such as CasX) can be enhanced by inclusion of different regulatory elements (intronic sequences, enhancers, etc.) that do not fit in AAV vectors expressing large transgene (e.g., spCas9) plasmids.

### Materials and Methods

[1104] Cloning and QC: A 4-part Golden Gate Assembly consisting of a pre-digested AAV backbone, small CRISPR protein-encoding DNA, and flanking 5′ and 3′ DNA sequences were used to generate AAV-cis plasmid as described in Example 1. 5′ sequences contained enhancer, protein promoter and N-terminal NLS, while 3′ sequences contained C-terminal NLS, WPRE, poly(A) signal, RNA promoter and guide RNA containing spacer 12.7. 5′ and 3′ parts were ordered as gene fragments, PCR-amplified, and assembled and assembled into AAV vectors. Cloning and plasmid QC, nucleofection, and FACS methods were conducted as described in Example 1.

[1105] Enhancement of editing by the inclusion of post-translation regulatory elements (PTRE) 1, 2, or 3 in the AAV cis plasmid 3 was tested in combination with different promoters driving expression of CasX. A first set of promoters were tested: transgene plasmids 4, 35, 36 37; transgene plasmids 5, 38, 39, 40 and transgene plasmids 6, 42, 43 have CasX protein expression driven by the CMV, UbC, EFS, CMV-s promoters, respectively. A second set of constructs tested included PTREs between the protein and poly(A) signal sequences and were generated with the Jet and JetUsp promoters compared to UbC promoter (transgenes 58, 72, 73, 74; transgenes 59, 75, 76, 77 and transgenes 53, 80 and 81, respectively) driving expression of CasX. PTRE sequences are listed in Table 18, and enhancer plus promoter sequences are listed in Table 19. The sequences of the additional components of AAV constructs, with the exception of sequences encoding the CasX (Table 63) and the one or more gRNA (Table 26), are listed in Table 64.

TABLE 18
Construct sequences of post-transcription
elements (PTRE) tested on base constructs

| Construct | PTRE | Size (bp) | SEQ ID NO |
|---|---|---|---|
| AAV35, AAV38, AAV72, AAV75 | 1 | 598 | 524 |
| AAV36, AAV39, AAV42, AAV73, | 2 | 593 | 525 |
| AAV76, AAV80 | | | |
| AAV37, AAV40, AAV43, AAV74, | 3 | 247 | 526 |
| AAV77, AAV81 | | | |

TABLE 19
Enhancer elements and sequences tested in
combination with the CMV core promoter

| Construct | Enhancer | Core promoter | Size (bp) | SEQ ID NO |
|---|---|---|---|---|
| AAV3 | CMV | CMV | 584 | 527 |
| AAV64 | N/A | CMV | 204 | 528 |
| AAV65 | Syn 1 | CMV | 414 | 529 |
| AAV66 | NPC5 | CMV | 314 | 530 |
| AAV67 | NPC7 | CMV | 324 | 531 |
| AAV68 | NPC127 | CMV | 304 | 532 |
| AAV69 | NPC190 | CMV | 364 | 533 |
| AAV70 | NPC249 | CMV | 274 | 534 |
| AAV71 | NPC286 | CMV | 354 | 535 |

### Results:

[1106] The effects of PTREs on transgene expression were assessed by cloning 3 enhancer sequences (PTRE1, PTRE2, and PTR3, Table 18) into an AAV-cis plasmid (construct AAV3) and construct plasmids containing shorter protein promoters (constructs AAV4-6, AAV53, AAV57 and AAV58 contain 400, 234, 335, 400, 164 and 326 bp promoter sequences, respectively).

[1107] AAV-cis plasmid activity was first confirmed by nucleofection in mNPC-tdT cells. For each vector, addition of PTRE enhanced editing activity at various levels (FIG. 29). Table 20 provides the lengths of promoter and PTREs. The addition of PTRE2 to the transgene cassette showed the highest CasX editing activity enhancement, with a 2-fold increase in editing levels for construct AAV36 compared to construct AAV4 (58.5% vs 25%), a 1.5-fold increase for construct AAV39 (35.4% vs 22.9%) compared to construct AAV5 and a 3-fold increase for construct AAV42 compared to construct AAV6 (30.5% vs 12%). The shortest enhancer sequence, PTRE3, also increased protein activity at various levels among construct AAV37 and AAV43 compared to other vectors.

[1108] Improvements in editing levels were also observed when constructs were packaged into AAV. Inclusion of PTRE2 in transgene increased editing across the AAV vectors in a similar manner. Trends in on-target editing observed in mNPCs with the AAV infection generally correlated with the AAV plasmid nucleofection data set (FIG. 30).

[1109] The trend was confirmed by testing another set of promoters with inclusion of these enhancer sequences. Across all AAV vectors tested, constructs including PTRE1 or PTRE2 in genomes yielded an average 1.5-fold increase compared to base vectors (FIG. 31). Unique combinations of short promoter and these post-transcriptional sequences led to the identification of vectors with increased editing levels with shorter promoters (e.g., AAV.74), which represents an advantage both for manufacturing siAAV under the carrying capacity limit of AAV, and for inclusion of more regulatory elements and CRISPR elements e.g., additional guides. Comparisons of editing versus transgene size are plotted in FIG. 32.

[1110] The results also demonstrate that inclusion of PTRE1 in the transgene plasmid improved editing levels across all promoters evaluated (FIG. 33), with less variability, while PTRE2 yielded the highest transgene improvement but with more variability across the promoters tested.

[1111] Several constructs with tissue-specific neuronal enhancers upstream of a single constitutive promoter were also tested. In this assay, 7 neuronal enhancer sequences (constructs AAV.65-72, sequences provided in Table 64) were cloned into a single AAV-cis plasmid (64) harboring a core CMV promoter and all demonstrated improved editing via nucleofection over base construct AAV.64 (FIG. 34). These constructs also outperformed construct AAV53, which contains a UbC promoter but did not outperform construct AAV3 which harbors the full CMV promoter (CMV enhancer+CMV core promoter).

TABLE 20
Constructs with or without PTREs and indicated sequence lengths
AAV Construct
(Sequence length indicated below)

| | 3 | 4 | 35 | 36 | 37 | 5 | 38 | 39 | 40 | 6 | 42 | 43 |
|---|---|---|---|---|---|---|---|---|---|---|---|---|
| Promoter | 584 | 400 | | | | 234 | | | | 335 | | |
| Length | | | | | | | | | | | | |
| PTRE 1 | — | — | 592 | — | — | — | 592 | — | — | — | — | — |
| PTRE 2 | — | — | — | 593 | — | — | — | 593 | — | — | 593 | — |
| PTRE 3 | — | — | — | — | 247 | — | — | — | 247 | — | — | 247 |
| AAV | 4550 | 4349 | 4964 | 4965 | 4619 | 4183 | 4798 | 4799 | 4453 | 4284 | 4900 | 4554 |
| transgene | | | | | | | | | | | | |

[1112] The results demonstrate that use of small promoters in the AAV transgene constructs permits the inclusion of additional accessory elements. These additional accessory elements, such as post-transcriptional regulatory elements to AAV-transgenes expressing CasX under the control of short but strong promoter sequences enable increased CasX expression and on-target editing while reducing cargo size, such that all components can be incorporated into a single siAAV vector.

### Example 9: Demonstration that a CasX:Dual-gRNA System Expressed from a Single AAV Vector can Edit the Target In Vitro

[1113] Experiments were performed to demonstrate the following: 1) Constructs of CasX and dual gRNAs expressed from an all-in-one AAV vector can edit the target locus; 2) the ability to package and deliver CasX with a dual-guide system within a single AAV vector for targeted editing; and 3) editing of a therapeutically-relevant locus by CasX and dual gRNAs delivered via a single AAV vector can excise the targeted genomic region. For the editing at a therapeutically-relevant locus by the CasX-dual-gRNA system, experiments were conducted to demonstrate the ability of CasX and the dual-guide system to mediate excision of a CTG repeat in the 3′UTR region of the human DMPK gene when delivered via AAVs in vitro into HEK293T cells. The ability to demonstrate editing mediated by the CasX:dual-gRNA system delivered and expressed from a single all-in-one AAV vector is significant because this is not achievable with traditionally-used Cas9-based systems.

### Materials and Methods

[1114] AAV plasmid cloning and nucleofection were conducted as described in Example 1.

[1115] Various configurations of two gRNA transcriptional unit blocks, also referred as “guide RNA stacks”, of the AAV transgene are illustrated in FIGS. 35-36 and FIG. 112.

[1116] FIG. 37 illustrates the configurations of the dual-guide stacks, with each stack composed of a gRNA scaffold-spacer combination 174.12.7, 174.12.2 or 174.NT driven by the human U6 promoter (Table 11). These specific dual-guide stacks were investigated by cloning two gRNA stacks in a tail-to-tail orientation (Construct ID 45-49) on the 3′ end of the poly(A) or in the same transcriptional orientation as the protein promoter-CasX unit, one on each side of the CasX unit (Construct ID 50-52). Pentagon-shaped boxes for CasX protein promoter and Pol III gRNA promoter depict orientation of transcription (tapered point; 5′ to 3′ or 3′ to 5′ orientation). Spacer sequences are 12.2 (TATAGCATACATTATACGAA, SEQ ID NO: 536); 12.7 (CTGCATTCTAGTTGTGGTTT, SEQ ID NO: 462); and NT (GGGTCTTCGAGAAGACCC, SEQ ID NO: 537).

[1117] AAV vector production and titering were conducted as described in Example 1. AAV transduction and editing assessment via FACs sorting were conducted as described in Example 1.

[1118] AAV constructs (Construct ID 211-214) assessed in FIGS. 106-107 were generated using methods described in Example 1. Sequences for these AAV plasmids are listed in Table 21.

TABLE 21
Sequences of AAV constructs with dual-guides targeting either side of the CTG
repeat in DMPK 3′ UTR. NT = non-targeting guide*

| Construct | | | SEQ ID |
|---|---|---|---|
| ID | Component Name | DNA Sequence | NO |
| 211 through | 5′ ITR | CCTGCAGGCAGCTGCGCGCTCGCTCGCTCACTGAGGCC | 423 |
| 214 | | GCCCGGGCGTCGGGCGACCTTTGGTCGCCCGGCCTCAG | |
| | | TGAGCGAGCGAGCGCGCAGAGAGGGAGTGGCCAACTCC | |
| | | ATCACTAGGGGTTCCT | |
| | buffer sequence | GCGGCCTCTAGACTCGAGGCGTT | 788 |
| | CMV enhancer + | GACATTGATTATTGACTAGTTATTAATAGTAATCAATT | |
| | promoter | ACGGGGTCATTAGITCATAGCCCATATATGGAGTTCCG | |
| | | CGTTACATAACTTACGGTAAATGGCCCGCCTGGCTGAC | |
| | | CGCCCAACGACCCCCGCCCATTGACGTCAATAATGACG | |
| | | TATGTTCCCATAGTAACGCCAATAGGGACTTTCCATTG | |
| | | ACGTCAATGGGTGGAGTATTTACGGTAAACTGCCCACT | |
| | | TGGCAGTACATCAAGTGTATCATATGCCAAGTACGCCC | |
| | | CCTATTGACGTCAATGACGGTAAATGGCCCGCCTGGCA | |
| | | TTATGCCCAGTACATGACCTTATGGGACTTTCCTACTT | |
| | | GGCAGTACATCTACGTATTAGTCATCGCTATTACCATG | |
| | | GTGATGCGGTTTTGGCAGTACATCAATGGGCGTGGATA | |
| | | GCGGTTTGACTCACGGGGATTTCCAAGTCTCCACCCCA | |
| | | TTGACGTCAATGGGAGTTTGTTTTGGCACCAAAATCAA | |
| | | CGGGACTTTCCAAAATGTCGTAACAACTCCGCCCCATT | |
| | | GACGCAAATGGGCGGTAGGCGTGTACGGTGGGAGGTCT | |
| | | ATATAAGCAGAGCT | |
| | buffer sequence | CTCTGGCTAACTACCGGT | 789 |
| | Kozak | GCCACC | NA |
| | start codon | ATGGCC | NA |
| | SV40 NLS | CCAAAGAAGAAGCGGAAGGTC | 790 |
| | linker | TCTAGA | NA |
| | CasX 491 | CAAGAGATCAAGAGAATCAACAAGATCAGAAGGAGACT | 791 |
| | | GGTCAAGGACAGCAACACAAAGAAGGCCGGCAAGACAG | |
| | | GCCCCATGAAAACCCTGCTCGTCAGAGTGATGACCCCT | |
| | | GACCTGAGAGAGCGGCTGGAAAACCTGAGAAAGAAGCC | |
| | | CGAGAACATCCCTCAGCCTATCAGCAACACCAGCAGGG | |
| | | CCAACCTGAACAAGCTGCTGACCGACTACACCGAGATG | |
| | | AAGAAAGCCATCCTGCACGTGTACTGGGAAGAGTTCCA | |
| | | GAAAGACCCCGTGGGCCTGATGAGCAGAGTTGCTCAGC | |
| | | CTGCCAGCAAGAAGATCGACCAGAACAAGCTGAAGCCC | |
| | | GAGATGGACGAGAAGGGCAATCTGACCACAGCCGGCTT | |
| | | TGCCTGCTCTCAGTGTGGCCAGCCTCTGTTCGTGTACA | |
| | | AGCTGGAACAGGTGTCCGAGAAAGGCAAGGCCTACACC | |
| | | AACTACTTCGGCAGATGTAACGTGGCCGAGCACGAGAA | |
| | | GCTGATTCTGCTGGCCCAGCTGAAACCTGAGAAGGACT | |
| | | CTGATGAGGCCGTGACCTACAGCCTGGGCAAGTTTGGA | |
| | | CAGAGAGCCCTGGACTTCTACAGCATCCACGTGACCAA | |
| | | AGAAAGCACACACCCCGTGAAGCCCCTGGCTCAGATCG | |
| | | CCGGCAATAGATACGCCTCTGGACCTGTGGGCAAAGCC | |
| | | CTGTCCGATGCCTGCATGGGAACAATCGCCAGCTTCCT | |
| | | GAGCAAGTACCAGGACATCATCATCGAGCACCAGAAGG | |
| | | TGGTCAAGGGCAACCAGAAGAGACTGGAAAGCCTGAGG | |
| | | GAGCTGGCCGGCAAAGAGAACCTGGAATACCCCAGCGT | |
| | | GACCCTGCCTCCTCAGCCTCACACAAAAGAAGGCGTGG | |
| | | ACGCCTACAACGAAGTGATCGCCAGAGTGAGAATGTGG | |
| | | GTCAACCTGAACCTGTGGCAGAAGCTGAAACTGTCCAG | |
| | | GGACGACGCCAAGCCTCTGCTGAGACTGAAGGGCTTCC | |
| | | CTAGCTTCCCTCTGGTGGAAAGACAGGCCAATGAAGTG | |
| | | GATTGGTGGGACATGGTCTGCAACGTGAAGAAGCTGAT | |
| | | CAACGAGAAGAAAGAGGATGGCAAGGTTTTCTGGCAGA | |
| | | ACCTGGCCGGCTACAAGAGACAAGAAGCCCTGAGGCCT | |
| | | TACCTGAGCAGCGAAGAGGACCGGAAGAAGGGCAAGAA | |
| | | GTTCGCCAGATACCAGCTGGGCGACCTGCTGCTGCACC | |
| | | TGGAAAAGAAGCACGGCGAGGACTGGGGCAAAGTGTAC | |
| | | GATGAGGCCTGGGAGAGAATCGACAAGAAGGTGGAAGG | |
| | | CCTGAGCAAGCACATTAAGCTGGAAGAGGAAAGAAGGA | |
| | | GCGAGGACGCCCAATCTAAAGCCGCTCTGACCGATTGG | |
| | | CTGAGAGCCAAGGCCAGCTTTGTGATCGAGGGCCTGAA | |
| | | AGAGGCCGACAAGGACGAGTTCTGCAGATGCGAGCTGA | |
| | | AGCTGCAGAAGTGGTACGGCGATCTGAGAGGCAAGCCC | |
| | | TTCGCCATTGAGGCCGAGAACAGCATCCTGGACATCAG | |
| | | CGGCTTCAGCAAGCAGTACAACTGCGCCTTCATTTGGC | |
| | | AGAAAGACGGCGTCAAGAAACTGAACCTGTACCTGATC | |
| | | ATCAATTACTTCAAAGGCGGCAAGCTGCGGTTCAAGAA | |
| | | GATCAAACCCGAGGCCTTCGAGGCTAACAGATTCTACA | |
| | | CCGTGATCAACAAAAAGTCCGGCGAGATCGTGCCCATG | |
| | | GAAGTGAACTTCAACTTCGACGACCCCAACCTGATTAT | |
| | | CCTGCCTCTGGCCTTCGGCAAGAGACAGGGCAGAGAGT | |
| | | TCATCTGGAACGATCTGCTGAGCCTGGAAACCGGCTCT | |
| | | CTGAAGCTGGCCAATGGCAGAGTGATCGAGAAAACCCT | |
| | | GTACAACAGGAGAACCAGACAGGACGAGCCTGCTCTGT | |
| | | TTGTGGCCCTGACCTTCGAGAGAAGAGAGGTGCTGGAC | |
| | | AGCAGCAACATCAAGCCCATGAACCTGATCGGCGTGGA | |
| | | CCGGGGCGAGAATATCCCTGCTGTGATCGCCCTGACAG | |
| | | ACCCTGAAGGATGCCCACTGAGCAGATTCAAGGACTCC | |
| | | CTGGGCAACCCTACACACATCCTGAGAATCGGCGAGAG | |
| | | CTACAAAGAGAAGCAGAGGACAATCCAGGCCAAGAAAG | |
| | | AGGTGGAACAGCGCAGAGCCGGCGGATACTCTAGGAAG | |
| | | TACGCCAGCAAGGCCAAGAATCTGGCCGACGACATGGT | |
| | | CCGAAACACCGCCAGAGATCTGCTGTACTACGCCGTGA | |
| | | CACAGGACGCCATGCTGATCTTCGAGAATCTGAGCAGA | |
| | | GGCTTCGGCCGGCAGGGCAAGAGAACCTTTATGGCCGA | |
| | | GAGGCAGTACACCAGAATGGAAGATTGGCTCACAGCTA | |
| | | AACTGGCCTACGAGGGACTGAGCAAGACCTACCTGTCC | |
| | | AAAACACTGGCCCAGTATACCTCCAAGACCTGCAGCAA | |
| | | TTGCGGCTTCACCATCACCAGCGCCGACTACGACAGAG | |
| | | TGCTGGAAAAGCTCAAGAAAACCGCCACCGGCTGGATG | |
| | | ACCACCATCAACGGCAAAGAGCTGAAGGTTGAGGGCCA | |
| | | GATCACCTACTACAACAGGTACAAGAGGCAGAACGTCG | |
| | | TGAAGGATCTGAGCGTGGAACTGGACAGACTGAGCGAA | |
| | | GAGAGCGTGAACAACGACATCAGCAGCTGGACAAAGGG | |
| | | CAGATCAGGCGAGGCTCTGAGCCTGCTGAAGAAGAGGT | |
| | | TTAGCCACAGACCTGTGCAAGAGAAGTTCGTGTGCCTG | |
| | | AACTGCGGCTTCGAGACACACGCCGATGAACAGGCTGC | |
| | | CCTGAACATTGCCAGAAGCTGGCTGTTCCTGAGAAGCC | |
| | | AAGAGTACAAGAAGTACCAGACCAACAAGACCACCGGC | |
| | | AACACCGACAAGAGGGCCTTTGTGGAAACCTGGCAGAG | |
| | | CTTCTACAGAAAAAAGCTGAAAGAAGTCTGGAAGCCCG | |
| | linker | GGATCC | NA |
| | SV40 NLS | CCAAAAAAGAAGAGAAAGGTA | 792 |
| | HA tag | TACCCATATGATGTCCCTGACTACGCT | 793 |
| | linker + stop | GGATCCTAA | NA |
| | codon | | |
| | buffer sequence | GAATTCCTAGAGCTCGCTGATCAGCCTCGA | 794 |
| | bGH poly(A) | CTGTGCCTTCTAGTTGCCAGCCATCTGTTGTTTGCCCC | 514 |
| | signal | TCCCCCGTGCCTTCCTTGACCCTGGAAGGTGCCACTCC | |
| | | CACTGTCCTTTCCTAATAAAATGAGGAAATTGCATCGC | |
| | | ATTGTCTGAGTAGGTGTCATTCTATTCTGGGGGGTGGG | |
| | | GTGGGGCAGGACAGCAAGGGGGAGGATTGGGAAGAGAA | |
| | | TAGCAGGCATGCTGGGGA | |
| | buffer sequence | GGTACCGT | NA |
| | U6 promoter | GAGGGCCTATTTCCCATGATTCCTTCATATTTGCATAT | 661 |
| | | ACGATACAAGGCTGTTAGAGAGATAATTGGAATTAATT | |
| | | TGACTGTAAACACAAAGATATTAGTACAAAATACGTGA | |
| | | CGTAGAAAGTAATAATTTCTTGGGTAGTTTGCAGTTTT | |
| | | AAAATTATGTTTTAAAATGGACTATCATATGCTTACCG | |
| | | TAACTTGAAAGTATTTCGATTTCTTGGCTTTATATATC | |
| | | TTGTGGAAAGGAC | |
| | buffer sequence | GAAACACC | NA |
| | Scaffold 174 | ACTGGCGCTTTTATCTGATTACTTTGAGAGCCATCACC | 691 |
| | | AGCGACTATGTCGTAGTGGGTAAAGCTCCCTCTTCGGA | |
| | | GGGAGCATCAAAG | |
| | Spacer 1 | See specific dual guide combos below | — |
| | (5′ CTG) | | |
| | buffer sequence | TTTTTTTTGGCTAGC | 4004 |
| | U6 promoter | GAGGGCCTATTTCCCATGATTCCTTCATATTTGCATAT | 661 |
| | | ACGATACAAGGCTGTTAGAGAGATAATTGGAATTAATT | |
| | | TGACTGTAAACACAAAGATATTAGTACAAAATACGTGA | |
| | | CGTAGAAAGTAATAATTTCTTGGGTAGTTTGCAGTTTT | |
| | | AAAATTATGTTTTAAAATGGACTATCATATGCTTACCG | |
| | | TAACTTGAAAGTATTTCGATTTCTTGGCTTTATATATC | |
| | | TTGTGGAAAGGAC | |
| | buffer sequence | GAAACACC | NA |
| | Scaffold 174 | ACTGGCGCTTTTATCTGATTACTTTGAGAGCCATCACC | 691 |
| | | AGCGACTATGTCGTAGTGGGTAAAGCTCCCTCTTCGGA | |
| | | GGGAGCATCAAAG | |
| | Spacer 2 | See specific dual guide combos below | — |
| | (3′ CTG) | | |
| | buffer sequence | TTTTTTTTGGCGGCCGC | 796 |
| | 3′ ITR | AGGAACCCCTAGTGATGGAGTTGGCCACTCCCTCTCTG | 424 |
| | | CGCGCTCGCTCGCTCACTGAGGCCGGGCGACCAAAGGT | |
| | | CGCCCGACGCCCGGGCTTTGCCCGGGCGGCCTCAGTGA | |
| | | GCGAGCGAGCGCGCAGCTGCCTGCAGG | |
| 211 | Spacer 1 (20.7) | CGGCTACAAGGACCCTTCGA | 4005 |
| | Spacer 2 (20.11) | CAGGCCTGCAGTTTGCCCAT | 4006 |
| 212 | Spacer 1 (20.7) | CGGCTACAAGGACCCTTCGA | 4005 |
| | Spacer 2 (NT) | GGGTCTTCGAGAAGACCC | 537 |
| 213 | Spacer 1 (NT) | GGGTCTTCGAGAAGACCC | 537 |
| | Spacer 2 (20.11) | CAGGCCTGCAGTTTGCCCAT | 4006 |
| 214 | Spacer 1 (NT) | GGGTCTTCGAGAAGACCC | 537 |
| | Spacer 2 (NT) | GGGTCTTCGAGAAGACCC | 537 |

*Components are listed in a 5′ to 3′ order within the constructs

[1119] Production of AAV vectors from AAV constructs 211-214 and subsequent titering were performed as described in Example 1.

### AAV Transduction of HEK293T Cells:

[1120] ˜10,000 HEK293T cells per well were seeded in 96-well plates. 24 hours later, seeded cells were treated with AAVs encoding CasX variant 491 with the dual-guide system (i.e., scaffold 174 with spacers 20.7-20.11, 20.7-NT, NT-20.11, or NT-NT; refer to Table 21 for sequences). Viral infection conditions were performed in triplicate, with normalized number of viral genomes (vg) among experimental vectors, in a series of three-fold dilution of multiplicity of infection (MOI) ranging from ˜1E6 to 1E4 vg/cell. Five days post-transduction, AAV-treated HEK293T cells were harvested for gDNA extraction for editing analysis at the DMPK locus by NGS. Briefly, amplicons were amplified from 200 ng of extracted gDNA with a set of primers targeting the CTG repeat region in the DMPK 3′ UTR and processed as described in Example 23.

### Results:

[1121] FIG. 35 is a schematic of two AAV construct configurations (architecture 1 and architecture 2). FIG. 36 and FIG. 112 show additional AAV construct configurations. FIG. 37 depicts the specific dual-spacer combinations. The results of the editing assay portrayed in FIG. 38 demonstrate that the constructs delivered as AAV transgene plasmids to mNPCs in architecture 2 edit with enhanced potency. The results from the assay assessing the different combinations of targeting and non-targeting spacers demonstrate that each individual gRNA was active, although, architectures with one targeting spacer and one non-targeting spacer (constructs AAV45 and AAV46) yielded approximately 18% lower editing levels. Certain combinations of targeting spacers yielded increased efficacy. While use of the dual-spacer combination 12.7-12.2 (construct AAV48) resulted in editing with significant potency, use of two sets of 12.7 spacers (construct AAV47) resulted in editing with 10% greater potency than that seen with the single gRNA architecture of construct AAV3 (FIG. 38).

[1122] The bar plot in FIG. 39 shows the results that use of AAV constructs 49, 50, and 52, which had the arrangements where two gRNA transcriptional units were placed on either side of the CasX gene, were also able to edit the target nucleic acid when delivered to mNPCs.

[1123] The plots in FIG. 40 show the results that use of AAV constructs 3, 45, 46, 47, and 48, delivered as AAVs, were able to edit the target stop cassette in mNPCs. Each vector displayed dose-dependent editing at the target locus (FIG. 40, left panel). At an MOI of 3e5, AAV.47 had <5% less potency than the original orientation vector AAV.3 (FIG. 40, right panel).

[1124] Experiments were also performed to demonstrate the use of CasX and a dual-guide system in targeting and excising the CTG repeat in the 3′UTR region of the human DMPK gene. The significance of evaluating the ability to target this repeat is that the neuromuscular disease myotonic dystrophy type 1 (DM1) is caused by the abnormal CTG repeat expansion in the 3′ noncoding region of the human DMPK gene. Here, HEK293T cells were transduced with dual-guide AAVs harboring either two DMPK-targeting spacers (20.7 and 20.11), the combination of one DMPK-targeting spacer and one non-targeting (NT) spacer (20.7 and NT or NT and 20.11), or two non-targeting spacers (NT-NT) at various MOIs. The results shown in FIG. 106 demonstrate on-target editing at either side or both sides flanking the CTG repeat expansion in transduced HEK293T cells occurred in a dose-dependent manner. The highest level of indel rate was attained with the dual-guide AAV (spacers 20.7 and 20.11), reaching ˜70% editing efficiency at the highest MOI of 1E6 vg/cell. In addition, infecting cells with AAVs expressing the combination of one DMPK-targeting spacer and one NT spacer (20.7 and NT or NT and 20.11) revealed that a higher editing efficiency was achieved on the 5′ region (by spacer 20.7 and NT) of the CTG repeat in comparison to editing on the 3′ region (by spacer NT and 20.11) (FIG. 106). FIG. 107 illustrates the quantification of percent editing of indel rate detected by NGS for the various types of editing (i.e., editing at 5′ or 3′ of CTG repeat, or dual-editing resulting in dropout of CTG repeat) induced by the AAVs harboring two DMPK-targeting spacers (20.7-20.11). Double-cut editing resulting in CTG repeat excision occurred in a dose-dependent manner, with 21% excision rate achieved at the highest MOI of 1E6 (FIG. 107). High levels of editing were similarly observed at the individual 5′ or 3′ region of the CTG repeat, with a majority of indel events occurring in the 5′ region.

[1125] Altogether, these experiments demonstrate the feasibility of using dual gRNAs in combination with the full CasX protein sequence in a single AAV, which would not be achievable with the use of larger CRISPR proteins, such as Cas9, due to the packaging constraints of the AAV capsid. The experiments also show that dual guide RNAs in an all-in-one vector construct were able to retain the ability to edit the target nucleic acid. Furthermore, the results demonstrate the ability to package and deliver CasX with the dual-guide system from an all-in-one single AAV vector in vitro, which resulted in efficient editing and excision of the target genomic region. In addition to using a dual-guide system to excise a target genomic region, combining two gRNA transcriptional units could also provide the ability to 1) increase gRNA expression and thus CasX-mediated editing or 2) target two distinct genes that might have cooperative therapeutic effects. The effects of varying the orientation and position of gRNA promoters are further investigated in Example 37.

### Example 10: Nuclear Localization Sequence (NLS) Selection Enhances Small CRISPR Protein Potency

[1126] This experiment shows that alteration of the nuclear localization sequence (NLS) utilized in AAV constructs comprising CasX and gRNA can modulate editing.

### Materials and Methods

[1127] AAV vectors were cloned and produced according to standard methods, which are described in Example 1. The amino acid sequences of the encoded NLS are presented in Table 22 and Table 23.

[1128] Methods for production of AAV vectors and nucleofection were conducted as described in Example 1. The sequences of the additional components of AAV constructs, with the exception of sequences encoding the CasX (Table 63) and the one or more gRNA (Table 26), are listed in Table 64.

TABLE 22
N-terminal NLS sequences

| | | SEQ ID |
|---|---|---|
| NLS Amino Acid Sequence* | NLS ID | NO |
| PKKKRKVSR | 1 | 538 |
| PKKKRKVGGSPKKKRKVGGSPKKKRKVGGSPKKKRKVSR | 2 | 539 |
| PKKKRKVGGSPKKKRKVGGSPKKKRKVGGSPKKKRKVGGSPKKKRKVGGSPKKKRKVSR | 3 | 540 |
| PAAKRVKLDSR | 4 | 541 |
| PAAKRVKLDGGSPAAKRVKLDSR | 5 | 542 |
| PAAKRVKLDGGSPAAKRVKLDGGSPAAKRVKLDGGSPAAKRVKLDSR | 6 | 543 |
| PAAKRVKLDGGSPAAKRVKLDGGSPAAKRVKLDGGSPAAKRVKLDGGSPAAKRVKLDGGSPA | 7 | 544 |
| AKRVKLDSR | | |
| KRPAATKKAGQAKKKKSR | 8 | 545 |
| KRPAATKKAGQAKKKKGGSKRPAATKKAGOAKKKKSR | 9 | 546 |
| PAAKRVKLDGGSPKKKRKVSR | 10 | 547 |
| PAAKKKKLDGGSPKKKRKVSR | 11 | 548 |
| PAAKKKKLDSR | 12 | 549 |
| PAAKKKKLDGGSPAAKKKKLDGGSPAAKKKKLDSR | 13 | 550 |
| PAAKKKKLDGGSPAAKKKKLDGGSPAAKKKKLDGGSPAAKKKKLDSR | 14 | 551 |
| PAKRARRGYKCSR | 15 | 552 |
| PAKRARRGYKCGSPAKRARRGYKCSR | 16 | 553 |
| PRRKREESR | 17 | 554 |
| PYRGRKESR | 18 | 555 |
| PLRKRPRRSR | 19 | 556 |
| PLRKRPRRGSPLRKRPRRSR | 20 | 557 |
| PAAKRVKLDGGKRTADGSEFESPKKKRKVGGS | 21 | 558 |
| PAAKRVKLDGGKRTADGSEFESPKKKRKVPPPPG | 22 | 559 |
| PAAKRVKLDGGKRTADGSEFESPKKKRKVGIHGVPAAPG | 23 | 560 |
| PAAKRVKLDGGKRTADGSEFESPKKKRKVGGGSGGGSPG | 24 | 561 |
| PAAKRVKLDGGKRTADGSEFESPKKKRKVPGGGSGGGSPG | 25 | 562 |
| PAAKRVKLDGGKRTADGSEFESPKKKRKVAEAAAKEAAAKEAAAKAPG | 26 | 563 |
| PAAKRVKLDGGKRTADGSEFESPKKKRKVPG | 27 | 564 |
| PAAKRVKLDGGSPKKKRKVGGS | 28 | 565 |
| PAAKRVKLDPPPPKKKRKVPG | 29 | 566 |
| PAAKRVKLDPG | 30 | 567 |
| PAAKRVKLDGGGSGGGSGGGS | 31 | 568 |
| PAAKRVKLDPPP | 32 | 569 |
| PAAKRVKLDGGGSGGGSGGGSPPP | 33 | 570 |
| PKKKRKVPPP | 34 | 571 |
| PKKKRKVGGS | 35 | 572 |
| MAPKKKRKVSR | 36 | 771 |
| MAPKKKRKVGGSPKKKRKVGGSPKKKRKVGGSPKKKRKVSR | 37 | 772 |

*Sequences in bold are NLS, while unbolded sequences are linkers.

TABLE 23
C-terminal NLS sequences

| | | SEQ ID |
|---|---|---|
| NLS Amino Acid Sequence* | NLS ID | NO |
| GSPKKKRKV | 1 | 573 |
| GSPKKKRKVGGSPKKKRKVGGSPKKKRKVGGSPKKKRKV | 2 | 574 |
| GSPKKKRKVGGSPKKKRKVGGSPKKKRKVGGSPKKKRKVGGSPKKKRKVGGSPKKKRKV | 3 | 575 |
| GSPAAKRVKLD | 4 | 576 |
| GSPAAKRVKLDGGSPAAKRVKLD | 5 | 577 |
| GSPAAKRVKLDGGSPAAKRVKLDGGSPAAKRVKLDGGSPAAKRVKLD | 6 | 578 |
| GSPAAKRVKLDGGSPAAKRVKLDGGSPAAKRVKLDGGSPAAKRVKLDGGSPAAKRVKLDGGS | 7 | 579 |
| PAAKRVKLD | | |
| GSKRPAATKKAGQAKKKK | 8 | 580 |
| KRPAATKKAGQAKKKKGGSKRPAATKKAGQAKKKK | 9 | 581 |
| GSPAAKRVKLGGSPAAKRVKLGGSPKKKRKVGGSPKKKRKV | 10 | 582 |
| GSKLGPRKATGRWGS | 11 | 583 |
| GSKRKGSPERGERKRHWGS | 12 | 584 |
| GSPKKKRKVGSGSKRPAATKKAGQAKKKKLE | 13 | 585 |
| GPKRTADSQHSTPPKTKRKVEFEPKKKRKV | 14 | 586 |
| GGGSGGGSKRTADSQHSTPPKTKRKVEFEPKKKRKV | 15 | 587 |
| AEAAAKEAAAKEAAAKAKRTADSQHSTPPKTKRKVEFEPKKKRKV | 16 | 588 |
| GPPKKKRKVGGSKRTADSQHSTPPKTKRKVEFEPKKKRKV | 17 | 589 |
| GPAEAAAKEAAAKEAAAKAPAAKRVKLD | 18 | 590 |
| GPGGGSGGGSGGGSPAAKRVKLD | 19 | 591 |
| GPPKKKRKVPPPPAAKRVKLD | 20 | 592 |
| GPPAAKRVKLD | 21 | 593 |
| GSPKKKRKV | 22 | 594 |
| GSPAAKRVKLD | 23 | 595 |
| VGSKRPAATKKAGQAKKKK | 24 | 596 |
| TGGGPGGGAAAGSGSPKKKRKVGSGSKRPAATKKAGOAKKKKLE | 25 | 597 |
| GGGPGGGAAAGSGSPKKKRKVGSGSKRPAATKKAGQAKKKKLE | 26 | 844 |
| TGGGPGGGAAAGSGSPKKKRKVGSGS | 27 | 599 |
| PPPPKKKRKVPPP | 28 | 600 |
| GGSPKKKRKVPPP | 29 | 601 |
| PPPPKKKRKV | 30 | 602 |
| GGSPKKKRKV | 31 | 603 |
| GGSPKKKRKVGGSGGSGGS | 32 | 604 |
| GGSPKKKRKVGGSPKKKRKV | 33 | 605 |
| GGSGGSGGSPKKKRKVGGSPKKKRKV | 34 | 606 |
| VGGGSGGGSGGGSPAAKRVKLD | 35 | 607 |
| VPPPPAAKRVKLD | 36 | 608 |
| VPPPGGGSGGGSGGGSPAAKRVKLD | 37 | 609 |
| VGGGSGGGSGGGSPAAKRVKLD | 38 | 610 |
| PPPPAAKRVKLD | 39 | 845 |
| PPPGGGSGGGSGGGSPAAKRVKLD | 40 | 846 |
| VGSPAAKRVKLD | 41 | 613 |

*Sequences in bold are NLS, while un-bolded sequences are linkers.

[1129] AAV transduction and editing level assessment in mNPTC-tdT cells by FACS were conducted as described in Example 1.

### Results:

[1130] Initial plasmid nucleofection revealed that a number of NLS permutations displayed improved editing when compared to control (1×SV40 NLS on both the N- and C-termini). In particular, N-terminal variants containing Cmyc or Nucleoplasmin NLSs significantly outperformed SV40 NLS combinations (FIG. 41, NLS numbers in FIGS. 41-42 refer to the NLS ID numbers in Table 22 and Table 23). This trend in N-terminal NLS variation was replicated in AAV transduction, where Cmyc and Nucleoplasmin NLS variants again outperformed SV40 NLS variants (FIG. 42). Finally, variations holding the Cmyc constant (FIG. 43) were tested, and the results demonstrate that the constructs with the highest level of editing contained a Cmyc NLS on both the N- and C-terminals.

[1131] The data show that selecting the amino acid sequence of the NLS can enhance editing outcomes in the AAV setting. Specifically, N-terminal Cmyc-containing NLS variants showed a clear improvement compared to N-terminal SV40 NLS variants. In addition, C-terminal Cmyc and Nuc variants improve editing over SV40 NLS variants. Repetitions of the SV40 NLS seem to be deleterious for editing efficiency on both the N- and C-terminals.

### Example 11: Introns in the 5′ UTR can Enhance Small CRISPR Protein Expression

[1132] This experiment demonstrates that transcriptional levels mediated by AAV vectors delivering small CRISPR proteins (such as CasX) can be enhanced by inclusion of different regulatory elements such as intronic sequences taken from viral, mouse, or human genomes that do not fit in AAV vectors expressing large transgene (e.g., spCas9) plasmids.

### Methods:

[1133] AAV cloning and production are as described in Example 1. 5′ sequences used to generate the AAV cis plasmid contain protein promoters including UbC, JeT, CMV, CAG, CBH, hSyn, or another Pol II promoter, intronic region, and N-terminal NLS, while 3′ sequences contain C-terminal NLS, poly A signal, RNA promoter and guide RNA containing spacer 12.7. Non-limiting examples of intron sequences to be incorporated into the constructs are listed in Table 24.

[1134] Enhancement in editing by the inclusion of intron 36 (transgene plasmid 59) is tested against transgene plasmid 58, which was the baseline construct not containing the intron. The rest of the introns in Table 24 have been derived from viral, mouse, and human origin.

TABLE 24
Intron sequences for incorporation into base construct AAV58

| Intron | Size (bp) | SEQ ID NO |
|---|---|---|
| 1 | 54 | 614 |
| 2 | 67 | 615 |
| 3 | 62 | 616 |
| 4 | 49 | 617 |
| 5 | 59 | 618 |
| 6 | 67 | 619 |
| 7 | 66 | 620 |
| 8 | 86 | 621 |
| 9 | 67 | 622 |
| 10 | 70 | 623 |
| 11 | 476 | 624 |
| 12 | 69 | 625 |
| 13 | 69 | 626 |
| 14 | 70 | 627 |
| 15 | 70 | 628 |
| 16 | 108 | 629 |
| 17 | 69 | 630 |
| 18 | 206 | 631 |
| 19 | 70 | 632 |
| 20 | 68 | 633 |
| 21 | 299 | 634 |
| 22 | 226 | 635 |
| 23 | 71 | 636 |
| 24 | 69 | 637 |
| 25 | 87 | 638 |
| 26 | 84 | 639 |
| 27 | 82 | 640 |
| 28 | 66 | 641 |
| 29 | 65 | 642 |
| 30 | 66 | 643 |
| 31 | 106 | 644 |
| 32 | 69 | 645 |
| 33 | 68 | 646 |
| 34 | 68 | 647 |
| 35 | 97 | 648 |
| 36 | 140 | 649 |
| 37 | 133 | 650 |
| 38 | 190 | 651 |
| 39 | 271 | 652 |
| 40 | 96 | 653 |
| 41 | 110 | 654 |
| 42 | 270 | 655 |
| 43 | 116 | 656 |
| 44 | 67 | 657 |
| 45 | 66 | 658 |

### Results:

[1135] The effects of introns on transgene expression are assessed by cloning 50 different introns into AAV-cis plasmid and then assaying for editing in the tdTomato assay used in the Examples supra.

[1136] When compared to the base construct without an intron, the addition of an intronic sequence increases the overall editing efficiency of AAV transgenes.

[1137] The results are expected to support that the addition of introns to siAAV-transgenes expressing CasX under the control of short but strong promoter sequences will enable increased CasX expression and on-target editing while reducing cargo size, further optimizing the AAV system.

### Example 12: Self-Targeting Alternative Linked Loci (STALL) Efficiency can be Regulated by Using Alternative PAMs in AAV Constructs

[1138] A self-inactivating AAV-CRISPR (siAAV-CRISPR) system was designed and evaluated for its ability to progressively decrease expression of the CRISPR nuclease after achieving the desirable editing outcome. The siAAV-CRISPR system included a self-targeting AAV-CRISPR that was designed such that it could be modulated by the incorporation of alternative protospacer adjacent motif (PAM) sequences adjacent to self-limiting segments incorporated into the construct, thereby mediating the levels of editing and self-inactivation kinetics. The use of weaker PAMs in the self-limiting segments of the vector delays cleavage of the self-limiting segments in comparison to the more active PAM utilized by the nuclease to edit the genomic target and, therefore, permits a longer duration of CasX expression prior to self-targeting and cleavage of the CasX, halting its ability to edit the spacer site on the genome. These experiments assessed differential activity constructs with the weaker PAMs and self-limiting segments. An overview of the AAV vector used in this design strategy for an siAAV-CRISPR system is shown in FIG. 44.

### Materials and Methods

### AAV Plasmid Cloning:

[1139] Each part in the AAV genome was separated by restriction enzyme sites to allow for modular cloning. A pAAV plasmid (construct 31) expressing CasX 491 or 676 under the control of a CMV promoter, with guide scaffold 174 and spacer 12.7 (CUGCAUUCUAGUUGUGGUUU, SEQ ID NO: 2860) under the control of the human U6 promoter was used to test the self-inactivation system modulated by various PAMs. Inserted in between the Pol II promoter and the sequence encoding the CasX protein was an identical copy of spacer 12.7, targeting the complementary strand orientation of the tdTomato locus with various appended PAM recognition motifs (TTC, construct 24; ATC, construct 25; CTC, construct 26; GTC, construct 27), as well as a scramble PAM that is not recognized by CasX (GGGG, construct 28). These various components were cloned into an AAV plasmid flanked by AAV2 ITRs following standard molecular cloning techniques. Cloned and sequence-validated constructs were maxi-prepped and subjected to quality assessment prior to AAV vector production using HEK293 Ts. The resulting constructs were used in experiments to generate the results shown in FIGS. 48, 49A-49B, and 50A-50B.

[1140] To obtain the results shown in FIG. 113, siAAV plasmids with construct IDs 148-158 were generated using similar methods as described above. Briefly, these siAAV plasmids expressed CasX 491 under the control of a U1A promoter, with guide scaffold 235 and a non-targeting spacer under the control of a human U6 promoter were generated to test the self-inactivation system modulated by the alternative PAMs. Inserted just upstream of the KOZAK sequence in between the Pol II promoter and the sequence encoding the CasX protein was an identical copy of a non-targeting spacer with various appended PAM recognition motifs (TTC, construct 148; ATC, construct 149; CTC, construct 150; GTC, construct 151; TTT construct 152; GTT construct 153; CTT construct 154; ATT construct 155; TGT construct 156; and CGC construct 157), as well as a control construct that did not contain a STALL site (construct 158). These various components were cloned into an AAV plasmid flanked by AAV2 ITRs following standard molecular cloning methods.

### AAV Vector Production was Performed as Described in Example 1.

[1141] To determine the viral genome (vg) titer, 1p L from crude lysate or column-purified virus was determined by qPCR using a set of primers and a probe specific for the CMV promoter or a 62 bp fragment located in the AAV2-ITR. Ten-fold serial dilutions of an AAV ITR plasmid was used as reference standards to calculate the titer (vg/mL) of viral samples.

Assessment of ssAAV Genome by NGS:

[1142] To assess the presence of indels in the packaged ssAAV genome, ssDNA was isolated from crude lysate or purified viruses by DNase I digest followed by Proteinase K incubation. 1-5 μL of ssDNA was used for amplification of the AAV transgene region flanking the self-inactivating off-target spacer. The amplified DNA was then bead-purified (Beckman Coulter, Agencourt Ampure XP) and re-amplified to incorporate the Illumina™ adapter sequence. Specifically, these primers contained an additional sequence at the 5′ end to introduce an Illumina™ adapter and a 16-nucleotide unique molecular identifier (UMI). Quality and quantification of the amplicon were assessed using a Fragment Analyzer DNA Analysis kit (Agilent, dsDNA 35-1500 bp). Amplicons were sequenced on an Illumina™ Miseq™ according to the manufacturer's instructions. Raw fastq files from sequencing were quality-controlled and processed using cutadapt v2.1 and flash2 v2.2.00, and CRISPResso2 v2.0.29. Each sequence was quantified for containing an insertion or deletion (indel) relative to the reference sequence, in a window around the 3′ end of the spacer (30 bp window centered at −3 bp from 3′ end of spacer). CasX activity was quantified as the total percent of reads that contain insertions, substitutions, and/or deletions anywhere within this window for each sample.

### PASS System to Assess CasX Variant Activity:

[1143] A multiplexed pooled approach was performed to assay protein variants using the PASS system. Briefly, a pooled HEK cell line was generated and termed PASS_V1.01. Each cell within the pool contained a genome-integrated single-guide RNA (sgRNA), paired with a specific target site. After transfection of protein-expression constructs, editing at a specific target by a specific spacer could be quantified by NGS. Each guide-target pair was designed to provide data related to activity, specificity, and targetability of the CasX-guide RNP complex. Fraction editing was normalized to a vehicle control.

### Results:

[1144] FIG. 48 shows the results of an editing assay assessing editing efficiency of CasX nuclease 491 in a custom HEK293 cell line, PASS_V1.01 assessing on-target editing sites at target sites consisting of the following PAM sequences: 48 TTC, 14 ATC, 22 CTC, and 11 GTC individual sites. Across 4 spacers, the TTC PAM spacers led to higher on-target editing (35% editing), followed by CTC and ATC PAM spacers (˜8% editing), followed by GTC PAM spacers, displaying the weakest editing (5%).

[1145] Differences in PAM-mediated inactivation were assessed in self-cleaving assays assessing AAV yield in production runs. Target spacer 12.7 was inserted in front of different PAMs (TTC, CTC, ATC, GTC, GGG) at the junction between the promoter and protein of pAAV.31 in constructs with a single guide targeting 12.7. The resulting siAAV vectors were produced and the titer of packaged viral genomes was quantified. The viral yield (vg/mL) correlated with the strength of the PAM used for the self-limiting segments utilized in the system (FIG. 49A). AAV.24 (TTC PAM) had the lowest viral yield after production, reflecting the higher rate of self-cleavage of the pAAV transgene during production and, therefore, reduction of encapsulation of the transgene into the AAV capsids compared to AAV control (AAV.31, FIG. 49B). The predicted “weakest” PAM, GTC (ID=27) led to a higher fraction of packaged siAAV, reflecting lower rate of self-cleavage during production.

[1146] These results were confirmed by NGS analysis of ssDNA at the expected cleavage site in the transgene from the packaged AAV (FIG. 50A). Production plasmids were used as controls and showed no editing at the self-limiting segment site. Levels of indels found in ssDNA from packaged siAAV correlated with the decreases in titers observed; AAV.24 had nearly 100% edited ssDNA, compared to AAV.27 (˜20%). These results were consistent across different production batches and AAV fractions (FIG. 50B).

[1147] Experiments resulting the data in FIG. 113 further investigated the effects of using additional alternative PAMs beyond the four NTCN PAMs; the PAMs tested in FIG. 113 were TTC (construct 148), ATC (construct 149), CTC (construct 150), GTC (construct 151), TTT (construct 152), GTT (construct 153), CTT (construct 154), ATT (construct 155), TGT (construct 156), and CGC (construct 157). NGS analysis of the ssDNA packaged in the siAAVs expressing CasX (siAAVs) with STALL sites using the various alternative PAMs revealed that siAAV constructs 148 to 151, which contained the NTCN PAMs, resulted in a higher cleavage rate (and thus lower percentage of intact AAV genomes) of ˜50% to ˜70% (FIG. 113). However, siAAV construct 152 (containing a TTT PAM) resulted in ˜20% cleavage rate. For siAAV constructs 153 to 157, only use of siAAV construct 153 resulted in a true cleavage rate of the AAV genomes (˜2%), since a closer analysis of the indel profile for each siAAV sample revealed a minor background contamination that contributed to an apparent cleavage rate for constructs 154 to 157 (FIG. 113). As anticipated, with the NO STALL experimental control construct 158, at least ˜98% of the AAV genomes remained intact (FIG. 113).

[1148] The results confirm that self-inactivating AAV constructs can be designed to affect, in a temporal and quantitative sense, cleavage of the AAV plasmid by taking advantage of the variety of PAM sequences and their “strength” within the CasX system. Such systems are expected to ameliorate safety concerns relating to off-target editing or an immune response triggered by prolonged expression of non-human proteins delivered in traditional AAV systems.

### Example 13: Self-Inactivating Efficiency can be Regulated by Using Alternative Regulatory Elements Such as RNA Pol III Promoter

[1149] This experiment demonstrates that the potency of small CRISPR proteins (such as CasX) encoded in AAV constructs can be modulated if certain RNA promoters are chosen for expression of the guide RNA incorporated in the construct. Differences in promoter strength can be exploited to create siAAV-CRISPR systems as follows. By using RNA promoters with different strengths, constructs can be designed that modulate guide RNA expression, which affects editing potency. As the siAAV system provides enough cargo space in the transgene to contain at least 2 independent RNA promoters expressing 2 guide RNAs, multiple guide RNAs under the control of different promoters can be “tuned” within a single AAV transgene. For siAAVs, this can be used to control the expression of a dedicated gRNA for self-inactivation. By identifying RNA promoters of differing strengths, constructs can be designed with pairs of RNA promoters that yield the ideal timing between the therapeutic and inactivating editing outcomes. A schematic of an exemplary vector design used in this siAAV system is presented as FIG. 47. Additionally, RNA promoters were tested that are inverted versions of each other to confirm that these RNA promoters can be used bidirectionally to promote transcription.

### Materials and Methods

[1150] AAV vectors were generated and produced as described in Example 1. 5′ sequences used to generate the AAV plasmid contained enhancer, CasX protein promoter and N-terminal NLS, while 3′ sequences contained C-terminal NLS, WPRE, poly(A) signal, RNA promoter (Table 25) and guide RNA containing spacer 12.7.

TABLE 25
RNA promoter sequences used to drive expression of
the sgRNA guide incorporated in the pAAV transgene.

| siAAV construct ID | RNA promoter | Size (bp) | SEQ ID NO |
|---|---|---|---|
| 31/30 | hU6 isoform 1 | 241 | 661 |
| 72 | H1 | 215 | 662 |
| 73 | 7SK | 267 | 496 |
| 54/58 | hU6 variant 1 | 103 | 497 |
| 55 | hU6 variant 2 | 38 | 498 |
| 56 | hU6 variant 3 | 67 | 499 |
| 57 | hU6 variant 4 | 79 | 500 |
| 59 | hU6 variant 5 | 111 | 501 |
| 60 | hU6 variant 6 | 127 | 502 |
| 61 | hU6 variant 7 | 123 | 503 |
| 62 | hU6 variant 8 | 143 | 504 |
| 63 | hU6 variant 9 | 131 | 505 |
| 64 | hU6 variant 10 | 159 | 506 |
| 65 | hU6 variant 11 | 103 | 507 |
| 66 | hU6 variant 12 | 111 | 508 |
| 67 | hU6 variant 13 | 127 | 509 |
| 68 | hU6 variant 14 | 103 | 510 |
| 69 | hU6 variant 15 | 131 | 511 |
| 70 | hU6 variant 16 | 159 | 512 |
| 71 | hU6 variant 17 | 128 | 513 |
| — | H1 core | 91 | 2688 |
| — | H1 core + 7SK hybrid 1 | 92 | 2689 |
| — | H1 core + 7SK hybrid 2 | 92 | 2690 |
| — | H1 core + 7SK hybrid 3 | 91 | 2691 |
| — | H1 core + 7SK hybrid 4 | 91 | 2692 |
| — | H1 core + 7SK hybrid 5 | 92 | 2693 |
| — | H1 core + 7SK hybrid 6 | 91 | 2694 |
| — | H1 core + 7SK hybrid 7 | 91 | 2695 |
| — | H1 core + 7SK hybrid 8 | 91 | 2696 |
| — | H1 core + 7SK hybrid 9 | 92 | 2697 |
| — | H1 core + U6 hybrid 1 | 91 | 2698 |
| — | H1 core + U6 hybrid 2 | 94 | 2699 |
| — | H1 core + 7SK + U6 | 92 | 2700 |
| | hybrid 1 | | |
| — | H1 core + U6 hybrid 3 | 90 | 2701 |
| — | H1 core + 7SK + U6 | 94 | 2702 |
| | hybrid 2 | | |
| — | H1 core + 7SK + U6 | 94 | 2703 |
| | hybrid 3 | | |
| — | hU6 isoform 2 | 247 | 2704 |
| — | hU6 isoform 3 | 249 | 2705 |
| — | hU6 isoform 4 | 249 | 2706 |
| — | hU6 isoform 5 | 249 | 2707 |
| 97-103, 110-116 | mU6 | 304 | 2708 |

[1151] mNPC nucleofection, AAV production, transduction, and FACS analysis were conducted as described in Example 1.

### Results:

[1152] The results shown in FIG. 51 demonstrate variable editing with three distinct RNA promoters with CasX 491, scaffold variant 174 and spacer 12.7. When AAV transgene plasmids were nucleofected into mNPCs at doses of 250 ng and 125 ng, constructs 72 and 73 show ˜40% of the activity of the base construct 31 at the 125 ng dose. At the 250 ng dose, construct 72 shows similar editing to the base construct 31, and construct 73 shows ˜50% of editing with respect to construct 31.

[1153] The results in FIGS. 52A-52B demonstrate that the same three distinct RNA promoters with protein 491, scaffold variant 174 and spacer 12.7, when delivered as AAV, edited the target stop cassette in mNPCs. AAV.3, AAV.32, AAV.33 were generated with transgene constructs 3, 32 and 33 respectively. Each vector displayed dose-dependent editing at the target locus (FIG. 52A). At an MOI of 3E5, AAV.32 and AAV.33 had 50-60% of the potency of AAV.3 (FIG. 52B).

[1154] The results shown in FIG. 53 demonstrate that four truncations of an RNA promoter with protein 491, scaffold variant 174 and spacer 12.7, when delivered by nucleofection of AAV transgene plasmid, edited the target stop cassette at differential levels in mNPCs at doses of 250 ng and 125 ng. Construct 54 had 33% of the potency of the base construct 30, while constructs 55, 56 and 57 did not show any editing and were comparable to a non-targeting control.

[1155] The results shown in FIG. 54 compared editing in mNPCs between base construct 30 to construct 54 when delivered as AAV. AAV.54 was able to edit at 7% compared to 15% for AAV.30 at an MOI of 3E5, consistent with the results from FIG. 54.

[1156] The results shown in FIG. 55 demonstrate that engineered RNA promoters with protein 491, scaffold variant 174 and spacer 12.7, when delivered by nucleofection of AAV transgene plasmid, edited the target stop cassette at differential levels in mNPCs at doses of 250 ng and 125 ng. One cluster of constructs (58, 59, 61, 62, 65, 66, 67, 68) all edit 15-20% compared to 55% for construct 30. Other Pol III variants, i.e., constructs 63, 64 and 69, all exhibited higher levels of editing at around 32% editing while construct 70 displayed 48% editing. These promoters are all smaller than the Pol III promoter in the base construct 30.

[1157] The results shown in FIGS. 56A and 56B demonstrate that engineered RNA promoters with protein 491, scaffold variant 174 and spacer 12.7, when delivered as AAV, edited the target stop cassette in mNPCs. Variable rates of editing with AAV were seen with constructs AAV.63, AAV.64, AAV.69, and AAV.70; all editing at rates between the base constructs AAV.30 and AAV.58.

[1158] The scatterplot shown in FIG. 57 shows editing as a function of the size of the total transgene size of the AAV variants. Constructs AAV.63, AAV.64, AAV.69, and AAV.70 all are shorter than the base U6 promoter in AAV.30 (see Table 25). This enables a relaxing of size constraints for other components in AAV designs.

[1159] The results of these experiments show that when a second promoter and guide are utilized for the self-inactivating siAAV system, a promoter can be selected with a differing strength than the one transcribing the therapeutic guide targeting the host gene to be edited. This is relevant for strategies where the timing of self-inactivation relative to the time required to achieve host gene editing is critical; i.e., a delay in self-inactivation relative to editing of the target nucleic acid is desired.

[1160] These experiments also show siAAV can be designed with pairs of RNA promoters that can function in both orientations (AAV.94 and AAV.100, AAV.95 and AAV.101). This indicates that it is possible to express two guides from a single RNA promoter, modulating the strength of transcription initiation simply by positioning guides in forward or reverse orientation relative to the promoter. This approach can be used in siAAV constructs by placing the therapeutic guide in the stronger direction and the self-inactivating guide in the weaker direction. Such constructs also conserve cargo space for inclusion of other elements in the transgene.

### Example 14: Self-Inactivating Efficiency in siAAV can be Regulated by Using Alternative sgRNA-Scaffold Sequences

[1161] In order to progressively decrease expression of the CRISPR system nuclease after achieving the desirable editing outcome, constructs of the siAAV system were designed to assess the ability of the self-inactivating segments to be modulated by different “weaker” gRNA-guide variants compared to the gRNA incorporated to edit the target nucleic acid. Addition of a second gRNA guide variant targeting a self-inactivating sequence incorporated in the transgene has many advantages, such as the ability to target any sequences or elements incorporated or inherently occurring in the siAAV transgene. The purpose of these experiments was to show that the use of a weaker scaffold targeted to the self-inactivating segment would result in delayed cleavage with respect to editing of the genomic target that is targeted by a stronger guide scaffold and, therefore, longer durations of CasX expression prior to self-cleavage.

### Materials and Methods

[1162] Guide scaffold variants were inserted into an siAAV transgene construct for plasmid and viral vector validation. Representative schematics of the designs are shown in FIG. 46 and FIG. 58. The AAV transgene between the ITRs was conceptually broken up into different parts, which consisted of sequences encoding the nuclease and accessory elements relevant to expression in mammalian cells and the guide scaffold and targeting spacer. The spacer 12.7 and guide sequences utilized in single-guide constructs are listed in Table 26. In constructs with dual guides, the second guide was made with spacer 12.2 (TATAGCATACATTATACGAA, SEQ ID NO: 536) or was non-targeting (CTGCATTCTAGTTGTGGTTT, SEQ ID NO: 462).

[1163] For these experiments, siAAV vectors were generated using the previously described methods for AAV production and purification, and nucleofection and editing assays were conducted as described in Examples 1 and 12.

TABLE 26
Guide sequences cloned into p59.491.U6.X.Y plasmids

| | Guide | | | | | | |
|---|---|---|---|---|---|---|---|
| Construct | spacer | Spacer | SEQ | Guide | SEQ | | SEQ |
| ID | variants | Sequence | ID NO | Sequence | ID NO | Guide + Spacer Sequence | ID NO |
| 31 | 174.12.7 | CTGCATT | 462 | ACTGGCGCTTTT | 691 | ACTGGCGCTTTTATCTGA | 701 |
| | | CTAGTTG | | ATCTgATTACTT | | TTACTTTGAGAGCCATCA | |
| | | TGGTTT | | TGAGAGCCATCA | | CCAGCGACTATGTCGTAG | |
| | | | | CCAGCGACTATG | | TGGGTAAAGCTCCCTCTT | |
| | | | | TCGTAgTGGGTA | | CGGAGGGAGCATCAAAGC | |
| | | | | AAGCTCCCTCTT | | TGCATTCTAGTTGTGGTT | |
| | | | | CGGAGGGAGCAT | | T | |
| | | | | CAAAG | | | |
| 39 | 229.12.7 | CTGCATT | 682 | ACTGGCACTTTT | 692 | ACTGGCACTTTTATCTGA | 702 |
| | | CTAGTTG | | ATCTGATTACTT | | TTACTTTGAGAGCCATCA | |
| | | TGGTT | | TGAGAGCCATCA | | CCAGCGACTATGTCGTAT | |
| | | | | CCAGCGACTATG | | GGGTAAAGCGCTTACGGA | |
| | | | | TCGTATGGGTAA | | CTTCGGTCCGTAAGAAGC | |
| | | | | AGCGCTTACGGA | | ATCAAAGCTGCATTCTAG | |
| | | | | CTTCGGTCCGTA | | TTGTGGTTT | |
| | | | | AGAAGCATCAAA | | | |
| | | | | G | | | |
| 40 | 230.12.7 | CTGCATT | 683 | ACTGGCACTTCT | 693 | ACTGGCACTTCTATCTGA | 703 |
| | | CTAGTTG | | ATCTGATTACTC | | TTACTCTGAGAGCCATCA | |
| | | TGGTT | | TGAGAGCCATCA | | CCAGCGACTATGTCGTAT | |
| | | | | CCAGCGACTATG | | GGGTAAAGCGCTTACGGA | |
| | | | | TCGTATGGGTAA | | CTTCGGTCCGTAAGAAGC | |
| | | | | AGCGCTTACGGA | | ATCAGAGCTGCATTCTAG | |
| | | | | CTTCGGTCCGTA | | TTGTGGTTT | |
| | | | | AGAAGCATCAGA | | | |
| 41 | 231.12.7 | CTGCATT | 684 | ACTGGCGCTTCT | 694 | ACTGGCGCTTCTATCTGA | 704 |
| | | CTAGTTG | | ATCTGATTACTC | | TTACTCTGAGAGCCATCA | |
| | | TGGTT | | TGAGAGCCATCA | | CCAGCGACTATGTCGTAT | |
| | | | | CCAGCGACTATG | | GGGTAAAGCCGCTTACGG | |
| | | | | TCGTATGGGTAA | | ACTTCGGTCCGTAAGAGG | |
| | | | | AGCCGCTTACGG | | CATCAGAGCTGCATTCTA | |
| | | | | ACTTCGGTCCGT | | GTTGTGGTTT | |
| | | | | AAGAGGCATCAG | | | |
| | | | | AG | | | |
| 42 | 232.12.7 | CTGCATT | 685 | ACTGGCACTTCT | 695 | ACTGGCACTTCTATCTGA | 705 |
| | | CTAGTTG | | ATCTGATTACTC | | TTACTCTGAGCGCCATCA | |
| | | TGGTT | | TGAGCGCCATCA | | CCAGCGACTATGTCGTAT | |
| | | | | CCAGCGACTATG | | GGGTAAAGCCGCTTACGG | |
| | | | | TCGTATGGGTAA | | ACTTCGGTCCGTAAGAGG | |
| | | | | AGCCGCTTACGG | | CATCAGAGCTGCATTCTA | |
| | | | | ACTTCGGTCCGT | | GTTGTGGTTT | |
| | | | | AAGAGGCATCAG | | | |
| | | | | AG | | | |
| 43 | 233.12.7 | CTGCATT | 686 | ACTGGCGCTTCT | 696 | ACTGGCGCTTCTATCTGA | 706 |
| | | CTAGTTG | | ATCTGATTACTC | | TTACTCTGAGCGCCATCA | |
| | | TGGTT | | TGAGCGCCATCA | | CCAGCGACTATGTCGTAT | |
| | | | | CCAGCGACTATG | | GGGTAAAGCCGCTTACGG | |
| | | | | TCGTATGGGTAA | | ACTTCGGTCCGTAAGAGG | |
| | | | | AGCCGCTTACGG | | CATCAGAGCTGCATTCTA | |
| | | | | ACTTCGGTCCGT | | GTTGTGGTTT | |
| | | | | AAGAGGCATCAG | | | |
| | | | | AG | | | |
| 44 | 234.12.7 | CTGCATT | 687 | ACTGGCGCTTCT | 697 | ACTGGCGCTTCTATCTGA | 707 |
| | | CTAGTTG | | ATCTGATTACTC | | TTACTCTGAGCGCCATCA | |
| | | TGGTT | | TGAGCGCCATCA | | CCAGCGACTATGTCGTAT | |
| | | | | CCAGCGACTATG | | GGGTAAAGCGCCTTACGG | |
| | | | | TCGTATGGGTAA | | ACTTCGGTCCGTAAGGAG | |
| | | | | AGCGCCTTACGG | | CATCAGAGCTGCATTCTA | |
| | | | | ACTTCGGTCCGT | | GTTGTGGTTT | |
| | | | | AAGGAGCATCAG | | | |
| | | | | AG | | | |
| 45 | 235.12.7 | CTGCATT | 688 | ACTGGCGCTTCT | 698 | ACTGGCGCTTCTATCTGA | 708 |
| | | CTAGTTG | | ATCTGATTACTC | | TTACTCTGAGCGCCATCA | |
| | | TGGTT | | TGAGCGCCATCA | | CCAGCGACTATGTCGTAG | |
| | | | | CCAGCGACTATG | | TGGGTAAAGCCGCTTACG | |
| | | | | TCGTAGTGGGTA | | GACTTCGGTCCGTAAGAG | |
| | | | | AAGCCGCTTACG | | GCATCAGAGCTGCATTCT | |
| | | | | GACTTCGGTCCG | | AGTTGTGGTT | |
| | | | | TAAGAGGCATCA | | | |
| | | | | GAG | | | |
| 46 | 236.12.7 | CTGCATT | 689 | ACGGGACTTTCT | 699 | ACGGGACTTTCTATCTGA | 709 |
| | | CTAGTTG | | ATCTGATTACTC | | TTACTCTGAAGTCCCTCA | |
| | | TGGTT | | TGAAGTCCCTCA | | CCAGCGACTATGTCGTAT | |
| | | | | CCAGCGACTATG | | GGGTAAAGCCGCTTACGG | |
| | | | | TCGTATGGGTAA | | ACTTCGGTCCGTAAGAGG | |
| | | | | AGCCGCTTACGG | | CATCAGAGCTGCATTCTA | |
| | | | | ACTTCGGTCCGT | | GTTGTGGTT | |
| | | | | AAGAGGCATCAG | | | |
| | | | | AG | | | |
| 47 | 237.12.7 | CTGCATT | 690 | ACCTGTAGTTCT | 700 | ACCTGTAGTTCTATCTGA | 710 |
| | | CTAGTTG | | ATCTGATTACTC | | TTACTCTGACTACAGTCA | |
| | | TGGTT | | TGACTACAGTCA | | CCAGCGACTATGTCGTAT | |
| | | | | CCAGCGACTATG | | GGGTAAAGCCGCTTACGG | |
| | | | | TCGTATGGGTAA | | ACTTCGGTCCGTAAGAGG | |
| | | | | AGCCGCTTACGG | | CATCAGAGCTGCATTCTA | |
| | | | | ACTTCGGTCCGT | | GTTGTGGTT | |
| | | | | AAGAGGCATCAG | | | |
| | | | | AG | | | |

### Results:

[1164] A self-inactivating AAV-CRISPR system (siAAV) that incorporated a second specialized guide in the AAV dedicated to self-cleavage was designed. This dual guide system allowed for a “weaker” guide scaffold to be linked to the self-targeting spacer (black pointed symbol in FIG. 58 indicates the target sequence of the self-targeting spacer) inserted in different locations of the transgene and, therefore, delay self-cleavage relative to the editing of the genomic target mediated by the nuclease and the “stronger” guide scaffold (white pointed symbol in FIG. 58) resulting in longer durations of CasX expression prior to self-cleavage.

[1165] FIG. 59 (top) shows the design of single guide targeting construct 31 and dual gRNA vectors 48, 49, 50, 51 based on sgRNA 174. Constructs 48 and 49 harbored one scrambled spacer (non-targeting, NT).

[1166] The results of FIGS. 60A and B show that AAV.31 and AAV.50 have similar editing levels (˜28% vs 25% at 3.0E+5 vg/cell MOI), confirming that the dual gRNA guide system efficiently edits. Furthermore, the 2nd sgRNA edited the genomic target in mNPCs at lower efficiency than the 1st sgRNA (AAV.48 vs AAV.49 respectively), which indicated that modulation of editing levels can be mediated by choice of the gRNA guide position in the dual guide system.

[1167] Modulation of activity with the dual gRNA guide system can also be further engineered by using different gRNA scaffold variants. Table 26 lists the encoding sequences of the gRNA scaffold variants packaged into siAAV and tested in vitro in mNPC-tdT cells. Vectors expressing scaffold variants 231-236 (AAV.41-46) performed at higher levels than ones with scaffold 174 and 237 (AAV.31/47) respectively (FIGS. 61A and B). AAV constructs with gRNA scaffold 235 displayed a 2-fold increased activity relative to constructs with gRNA scaffold 174 at a MOI of 3.0e+5 (AAV.45 vs AAV.31; FIG. 62). AAV constructs with a variety of scaffold variants displayed a 1.5-fold increase relative to scaffold 174 (AAV.41-44 vs. AAV.31).

[1168] AAV expressing dual gRNA guide stacks is an efficient system to allow multiple genomic sequences to be edited within the same AAV vector, and therefore are very useful for self-cleaving AAV systems. The results support that editing efficiency can be precisely modulated by the use of engineered gRNA guide variants with scaffold-mediated different levels of activity.

### Example 15: siAAVs Ensure Efficient AAV Episomal Removal

[1169] AAVs are efficient delivery vehicles for gene therapies. However, the stability of their episomal genomes allows for their persistent expression in the nucleus, which over a long period of time can trigger potential off-targeting effects and undesired immunogenic responses in the transduced cells. Designing a self-inactivating AAV-CRISPR/CasX system to restrict the persistent expression of delivered therapeutic AAVs mitigates these undesired consequences after the target genomic locus has been edited.

[1170] To develop a self-inactivating AAV-CRISPR/CasX system, a strategy leveraging the differential Protospacer Adjacent Motif (PAM) recognition capability of CasX to mediate its variable editing levels was employed. It was previously shown that CasX has the strongest relative preference for the TTC PAM (thus resulting in the highest cleavage rate), followed by the ATC PAM, and then the CTC PAM. Here, the nuclease construct was engineered such that the coding sequence for CasX was flanked by proto-spacer sites identical to the on-target tdTomato proto-spacer site in the mouse genome (hereafter tdTom proto-spacer), in addition to the targeting gRNA bearing the tdTomato spacer sequence. The flanking tdTom proto-spacer sequences were preceded by TTC, ATC, or CTC PAMs, while the TTC PAM was present at the tdTomato proto-spacer site in the mouse genome. The presence of PAMs with reduced recognition efficiency at the flanking tdTom proto-spacer sites allows CasX to be expressed for sufficient duration to achieve a concentration to cut the high efficiency PAM tdTom proto-spacer at the genomic target locus before eventually targeting its own coding sequence for self-inactivation. As a negative control, a nuclease construct without the flanking tdTom protospacer sequences for self-inactivation was used.

### Materials and Methods

[1171] To evaluate the self-inactivation activity of the designed siAAV system, AAVs containing CasX-tdTomato gRNA genes, with or without the self-inactivation system, were produced by co-transfecting the three plasmids (an adenoviral helper plasmid, an AAV packaging plasmid, and the AAV transgene) into LentiX HEK293T cells, as previously described in Example 12. Results:

[1172] FIG. 63 is a western blot analysis of CasX protein levels in transfected HEK293T cells, with GAPDH serving as the loading control. Cells transfected with the AAV-CRISPR construct without the flanking tdTom protospacer sequences for self-inactivation are labeled as ‘No STALL’ (lane 1), while cells transfected with the constructs harboring the flanking tdTom protospacer sequences preceded by TTC, ATC, or CTC PAMs are labelled as Dual TTC STALL, Dual ATC STALL, or Dual CTC STALL respectively (lanes 2-4). CasX protein levels for the Dual STALL variants were quantified from the western blot. The Dual TTC STALL construct resulted in a 238-fold reduction in CasX protein levels, while the Dual ATC STALL resulted in a 27-fold reduction and the Dual CTC STALL resulted in a 38-fold reduction relative to the CasX levels with the No STALL control construct.

[1173] The results show that AAVs harboring the tdTom protospacer sequences with TTC PAM, for which CasX 491 has the highest relative affinity, demonstrated the strongest self-inactivating activity as illustrated by the highest fold knockdown of CasX protein levels. Meanwhile, AAVs expressing constructs that result in lower CasX-PAM binding affinity (Dual ATC STALL and Dual CTC STALL) displayed weaker self-inactivating activity and therefore, lower relative knockdown of CasX. These data indicate that the level of CasX self-cleavage can be effectively modulated by varying PAMs with reduced recognition efficiency at the protospacer sequences flanking the nuclease construct. More importantly, such fine tuning of CasX activity and self-inactivation allows optimization of the therapeutic editing capability of CasX while minimizing its potential to induce off-target effects and undesired immunogenic outcomes.

### Example 16: siAAVs do not Impede CRISPR Editing Levels

[1174] This experiment assessed levels of on-target editing generated by siAAVs compared to an AAV that did not contain a self-inactivating segment.

### Materials and Methods

[1175] AAV vector production: Viral vectors were produced as described in Example 12. The self-inactivating sequence targeted by spacer 12.7 was incorporated in the AAV transgene at the junction between the promoter and the Kozak sequence with 5 different PAM sequences (TTCA, CTC, ATC, GTC and GGGG, in AAV.24, 25, 26, 27, 28 respectively). Vector AAV.31 does not contain a self-targeting sequence.

[1176] Reporter cell lines: Primary mouse cortical tissue was isolated by dissection from embryonic 18.5 pups, dissociated (MACS papain dissociation kit) and plated in neurobasal media supplemented with B27, 25 μM glutamic Acid, and 1× penicillin/streptomycin. 20,000 cells were plated on PLF coated plates for AAV transduction analysis. AAV transduction and assessing editing activity by FACS was conducted as described in Example 12.

### Results:

[1177] The results of the assay (FIG. 64) show the transduction levels in cortical neurons cultures derived from primary neuroprogenitor cells with six AAVs (AAV.24, 25, 26, 27, 28) harboring the self-inactivating spacer in transgene cassettes with different PAM sequences (TTC, CTC, ATC, GTC). Although the self-inactivating spacer impacted AAV titer, as shown in Example 12, based on editing strength mediated by the PAM (TTC>CTC>ATC>GTC), MOI-normalized siAAVs and control AAVs had similar editing levels (20-25% editing at 5.0e+5 vg/cell), indicated that editing of the target was not impacted by the self-inactivation.

[1178] These results shows that although the self-inactivating AAV-CRISPR systems efficiently led to transgene self-cleavage over time (see Example 12), the on-target editing levels in cells were not significantly impeded, supporting the utility of the siAAV system.

### Example 17: shRNAs Silence CRISPR Protein Expression in Production Cell Lines

[1179] The results of NGS analysis of packaged siAAV genomes in Example 12 showed that CasX cleaved the therapeutic transgene during production of the AAV in packaging cells, which leads to the undesirable outcome of the packaging of partial AAV genomes. A strategy to bypass the cleaving of the AAV transgene is to down-regulate the expression of CasX only during AAV production. One way to do this is through silencing translation of CasX using shRNAs by degrading the CasX mRNA transcript. The goal of this experiment was to demonstrate that shRNA can silence the CasX protein expression in AAV producing cells and prevent the packaging of partial AAV genomes during production. FIG. 72 shows the possible vector arrangements for supplying one or more shRNA during AAV packaging. The shRNA, or multiple shRNAs can either be supplied on the same plasmid as the AAV viral genome comprising the transgene, on another plasmid in production such as pRepCap or pHelper plasmid, on multiple production plasmids, or on a separate polynucleotide (FIG. 72).

### Materials and Methods

Cloning shRNA Sequences:

[1180] A destination vector allowing for easy cloning of multiple shRNA constructs was generated from p59.491.174.NT (containing the encoding sequences for CasX 491, gRNA 174 and a non-targeting spacer). p59 was digested with a PciI, which cuts between the bacterial origin and the AAV ITR. The shRNA destination site was created by performing PCR of an eGFP gene with an EF-1α promoter and ordering a sequence coding for a 3′ UTR containing multiple unique restriction sites and then inserting the fragments into the digested p59 vector with Gibson Assembly. shRNA sequences (Table 9 and Table 27) were designed with a miR-30a backbone to direct processing in the cell. To clone shRNAs into the first cloning site, the shRNA sequences were amplified with primers to create homology arms on either side of the AvrII cut site. The destination vector was digested with AvrII and the shRNA was inserted by Gibson Assembly. To make plasmids with two shRNAs, the single-shRNA plasmid was digested with NheI, the shRNA to be inserted into the second site was PCR-amplified with primers to add homology arms for the NheI site, and the two fragments were assembled with Gibson Assembly. This resulted in a plasmid in which the shRNA sequence, or sequences, were included on the same plasmid as the AAV transgene sequence, but were outside of the region between the ITRs that was packaged into the AAV vectors by the packaging cells.

TABLE 27
shRNA sequences

| | siAAV | | | | |
|---|---|---|---|---|---|
| | construct | | SEQ ID | | SEQ ID |
| Name | ID | DNA sequence | NO: | RNA sequence* | NO: |
| shRNA1a | 1 | CCTAGGCAACAGAAGGCT | 2861 | CCUAGGCAACAGAAGGCU | 2873 |
| | | AAAGAAGGTATATTGCTG | | AAAGAAGGUAUAUUGCUG | |
| | | TTGACAGTGAGCGACGCT | | UUGACAGUGAGCGACGCU | |
| | | GATCATCAATTACTTACT | | GAUCAUCAAUUACUUACU | |
| | | GTGAAGCCACAGATGGGT | | GUGAAGCCACAGAUGGGU | |
| | | AAGTAATTGATGATCAGC | | AAGUAAUUGAUGAUCAGC | |
| | | GCTGCCTACTGCCTCGGA | | GCUGCCUACUGCCUCGGA | |
| | | CTTCAAGGGGCTACTTTA | | CUUCAAGGGGCUACUUUA | |
| | | GGAGCAATTATC | | GGAGCAAUUAUC | |
| shRNA2a | 2 | CCTAGGCAACAGAAGGCT | 2862 | CCUAGGCAACAGAAGGCU | 2874 |
| | | AAAGAAGGTATATTGCTG | | AAAGAAGGUAUAUUGCUG | |
| | | TTGACAGTGAGCGACGCA | | UUGACAGUGAGCGACGCA | |
| | | ACTGCGCCTTCATTTACT | | ACUGCGCCUUCAUUUACU | |
| | | GTGAAGCCACAGATGGGT | | GUGAAGCCACAGAUGGGU | |
| | | AAATGAAGGCGCAGTTGC | | AAAUGAAGGCGCAGUUGC | |
| | | GCTGCCTACTGCCTCGGA | | GCUGCCUACUGCCUCGGA | |
| | | CTTCAAGGGGCTACTTTA | | CUUCAAGGGGCUACUUUA | |
| | | GGAGCAATTATC | | GGAGCAAUUAUC | |
| shRNA3a | 3 | CCTAGGCAACAGAAGGCT | 2863 | CCUAGGCAACAGAAGGCU | 2875 |
| | | AAAGAAGGTATATTGCTG | | AAAGAAGGUAUAUUGCUG | |
| | | TTGACAGTGAGCGACGCT | | UUGACAGUGAGCGACGCU | |
| | | GAGCAAGCACATTAAACT | | GAGCAAGCACAUUAAACU | |
| | | GTGAAGCCACAGATGGGT | | GUGAAGCCACAGAUGGGU | |
| | | TTAATGTGCTTGCTCAGC | | UUAAUGUGCUUGCUCAGC | |
| | | GCTGCCTACTGCCTCGGA | | GCUGCCUACUGCCUCGGA | |
| | | CTTCAAGGGGCTACTTTA | | CUUCAAGGGGCUACUUUA | |
| | | GGAGCAATTATC | | GGAGCAAUUAUC | |
| shRNA4a | 4 | CCTAGGCAACAGAAGGCT | 2864 | CCUAGGCAACAGAAGGCU | 2876 |
| | | AAAGAAGGTATATTGCTG | | AAAGAAGGUAUAUUGCUG | |
| | | TTGACAGTGAGCGACGCC | | UUGACAGUGAGCGACGCC | |
| | | TGATCATCAATTACTACT | | UGAUCAUCAAUUACUACU | |
| | | GTGAAGCCACAGATGGGT | | GUGAAGCCACAGAUGGGU | |
| | | AGTAATTGATGATCAGGC | | AGUAAUUGAUGAUCAGGC | |
| | | GCTGCCTACTGCCTCGGA | | GCUGCCUACUGCCUCGGA | |
| | | CTTCAAGGGGCTACTTTA | | CUUCAAGGGGCUACUUUA | |
| | | GGAGCAATTATC | | GGAGCAAUUAUC | |
| shRNA5a | 5 | CCTAGGCAACAGAAGGCT | 2865 | CCUAGGCAACAGAAGGCU | 2877 |
| | | AAAGAAGGTATATTGCTG | | AAAGAAGGUAUAUUGCUG | |
| | | TTGACAGTGAGCGACGGT | | UUGACAGUGAGCGACGGU | |
| | | ACCTGATCATCAATTACT | | ACCUGAUCAUCAAUUACU | |
| | | GTGAAGCCACAGATGGGT | | GUGAAGCCACAGAUGGGU | |
| | | AATTGATGATCAGGTACC | | AAUUGAUGAUCAGGUACC | |
| | | GCTGCCTACTGCCTCGGA | | GCUGCCUACUGCCUCGGA | |
| | | CTTCAAGGGGCTACTTTA | | CUUCAAGGGGCUACUUUA | |
| | | GGAGCAATTATC | | GGAGCAAUUAUC | |
| shRNA6a | 6 | CCTAGGCAACAGAAGGCT | 2866 | CCUAGGCAACAGAAGGCU | 2878 |
| | | AAAGAAGGTATATTGCTG | | AAAGAAGGUAUAUUGCUG | |
| | | TTGACAGTGAGCGACGTT | | UUGACAGUGAGCGACGUU | |
| | | CATTTGGCAGAAAGAACT | | CAUUUGGCAGAAAGAACU | |
| | | GTGAAGCCACAGATGGGT | | GUGAAGCCACAGAUGGGU | |
| | | TCTTTCTGCCAAATGAAC | | UCUUUCUGCCAAAUGAAC | |
| | | GCTGCCTACTGCCTCGGA | | GCUGCCUACUGCCUCGGA | |
| | | CTTCAAGGGGCTACTTTA | | CUUCAAGGGGCUACUUUA | |
| | | GGAGCAATTATC | | GGAGCAAUUAUC | |
| shRNA7a | 7 | CCTAGGCAACAGAAGGCT | 2867 | CCUAGGCAACAGAAGGCU | 2879 |
| | | AAAGAAGGTATATTGCTG | | AAAGAAGGUAUAUUGCUG | |
| | | TTGACAGTGAGCGACGCA | | UUGACAGUGAGCGACGCA | |
| | | TCAATTACTTCAAAGACT | | UCAAUUACUUCAAAGACU | |
| | | GTGAAGCCACAGATGGGT | | GUGAAGCCACAGAUGGGU | |
| | | CTTTGAAGTAATTGATGC | | CUUUGAAGUAAUUGAUGC | |
| | | GCTGCCTACTGCCTCGGA | | GCUGCCUACUGCCUCGGA | |
| | | CTTCAAGGGGCTACTTTA | | CUUCAAGGGGCUACUUUA | |
| | | GGAGCAATTATC | | GGAGCAAUUAUC | |
| shRNA8a | 8, 89, | CCTAGGCAACAGAAGGCT | 2868 | CCUAGGCAACAGAAGGCU | 2880 |
| | 90-116 | AAAGAAGGTATATTGCTG | | AAAGAAGGUAUAUUGCUG | |
| | | TTGACAGTGAGCGACGTA | | UUGACAGUGAGCGACGUA | |
| | | CCTGATCATCAATTAACT | | CCUGAUCAUCAAUUAACU | |
| | | GTGAAGCCACAGATGGGT | | GUGAAGCCACAGAUGGGU | |
| | | TAATTGATGATCAGGTAC | | UAAUUGAUGAUCAGGUAC | |
| | | GCTGCCTACTGCCTCGGA | | GCUGCCUACUGCCUCGGA | |
| | | CTTCAAGGGGCTACTTTA | | CUUCAAGGGGCUACUUUA | |
| | | GGAGCAATTATC | | GGAGCAAUUAUC | |
| shRNA9a | 9 | CCTAGGCAACAGAAGGCT | 2869 | CCUAGGCAACAGAAGGCU | 2881 |
| | | AAAGAAGGTATATTGCTG | | AAAGAAGGUAUAUUGCUG | |
| | | TTGACAGTGAGCGACGCT | | UUGACAGUGAGCGACGCU | |
| | | GATCTTCGAGAATCTACT | | GAUCUUCGAGAAUCUACU | |
| | | GTGAAGCCACAGATGGGT | | GUGAAGCCACAGAUGGGU | |
| | | AGATTCTCGAAGATCAGC | | AGAUUCUCGAAGAUCAGC | |
| | | GCTGCCTACTGCCTCGGA | | GCUGCCUACUGCCUCGGA | |
| | | CTTCAAGGGGCTACTTTA | | CUUCAAGGGGCUACUUUA | |
| | | GGAGCAATTATC | | GGAGCAAUUAUC | |
| shRNA10a | 10 | CCTAGGCAACAGAAGGCT | 2870 | CCUAGGCAACAGAAGGCU | 2882 |
| | | AAAGAAGGTATATTGCTG | | AAAGAAGGUAUAUUGCUG | |
| | | TTGACAGTGAGCGACGGA | | UUGACAGUGAGCGACGGA | |
| | | AGAAGGGCAAGAAGTACT | | AGAAGGGCAAGAAGUACU | |
| | | GTGAAGCCACAGATGGGT | | GUGAAGCCACAGAUGGGU | |
| | | ACTTCTTGCCCTTCTTCC | | ACUUCUUGCCCUUCUUCC | |
| | | GCTGCCTACTGCCTCGGA | | GCUGCCUACUGCCUCGGA | |
| | | CTTCAAGGGGCTACTTTA | | CUUCAAGGGGCUACUUUA | |
| | | GGAGCAATTATC | | GGAGCAAUUAUC | |
| shRNA11a | 11 | CCTAGGCAACAGAAGGCT | 2871 | CCUAGGCAACAGAAGGCU | 2883 |
| | | AAAGAAGGTATATTGCTG | | AAAGAAGGUAUAUUGCUG | |
| | | TTGACAGTGAGCGACGGA | | UUGACAGUGAGCGACGGA | |
| | | TCAACGAGAAGAAAGACT | | UCAACGAGAAGAAAGACU | |
| | | GTGAAGCCACAGATGGGT | | GUGAAGCCACAGAUGGGU | |
| | | CTTTCTTCTCGTTGATCC | | CUUUCUUCUCGUUGAUCC | |
| | | GCTGCCTACTGCCTCGGA | | GCUGCCUACUGCCUCGGA | |
| | | CTTCAAGGGGCTACTTTA | | CUUCAAGGGGCUACUUUA | |
| | | GGAGCAATTATC | | GGAGCAAUUAUC | |
| shRNA12a | 12 | CCTAGGCAACAGAAGGCT | 2872 | CCUAGGCAACAGAAGGCU | 2884 |
| | | AAAGAAGGTATATTGCTG | | AAAGAAGGUAUAUUGCUG | |
| | | TTGACAGTGAGCGACGGA | | UUGACAGUGAGCGACGGA | |
| | | AGAGTTCCAGAAAGAACT | | AGAGUUCCAGAAAGAACU | |
| | | GTGAAGCCACAGATGGGT | | GUGAAGCCACAGAUGGGU | |
| | | TCTTTCTGGAACTCTTCC | | UCUUUCUGGAACUCUUCC | |
| | | GCTGCCTACTGCCTCGGA | | GCUGCCUACUGCCUCGGA | |
| | | CTTCAAGGGGCTACTTTA | | CUUCAAGGGGCUACUUUA | |
| | | GGAGCAATTATC | | GGAGCAAUUAUC | |

*Sequences of the shRNA constructs as transcribed as part of the eGFP UTR are shown. The expected guide strand resulting from each shRNA is shown in bold.

### Western Blot Analysis:

[1181] 12-well plates were seeded with 0.25E6 HEK293T cells/well. 24 hours after plating, cells were transfected with 500 ng of shRNA transgene plasmid. Cells were harvested 72 hours post-transfection, pelleted, and lysed. Lysate was clarified by centrifugation, and the protein concentration in each lysate was measured with a Pierce 660 assay. 15 μg of whole cell lysate was loaded into each well of a BioRad TGX Stain-Free gel. When the dye front reached the bottom of the gel, proteins were transferred to a PVDF membrane, blocked and blotted overnight at 4° C. with rabbit anti-HA (1:1000). Following primary antibody incubation, the membrane was rinsed and washed, then blotted with goat anti-rabbit (1:5000) for 1 hour at room temperature. The membrane was developed using 1 mL of Clarity Western ECL Substrate (BioRad), and imaged, the HRP reaction quenched, and re-blotted according to standard methods. The membrane was blotted overnight at 4° C. with Ms.uGAPDH (1:1000). And then later incubated with Gt.uMs (1:5000) for 1 hour at room temperature. Following secondary antibody incubation, the membrane was washed and developed using 1 mL of Clarity Western ECL Substrate (BioRad). CasX band intensity was normalized to GAPDH.

### Western Blot Quantification:

[1182] Band intensities were quantified using the Image Lab software from BioRad. The expression of CasX was normalized internally within each sample to account for differences in loading. To do this, the adjusted band volume of CasX was divided by the adjusted band volume of GAPDH. To determine the expression of CasX in Constructs 1-12 as a fraction of Construct 29, the normalized band volume of Constructs 1-12 was divided by the normalized band volume of Construct 29. Lastly, to determine the fold-knockdown of CasX, the normalized expression of CasX in Construct 29 was divided by the normalized expression of CasX in Constructs 1-12.

### Results:

[1183] The results show that the incorporation of shRNAs into the AAV system mediated silencing of CasX protein expression to varying degrees. shRNAs 8, 11, 12 (constructs 8, 11, 12) silenced expression down to the level observed in the untransfected protein control (64, 240, and 250-fold knockdown respectively) while shRNA 3 and 7 (constructs 3, 7) did not have an effect on silencing CasX expression in the AAV production cell line (FIG. 65). As shown by Western blot quantification in FIG. 66, shRNAs 8, 11, and 12 were superior in their ability to silence CasX protein expression.

[1184] This experiment demonstrated that shRNAs can be used to silence CasX expression in the AAV production cell line such that the resulting AAV particles would have a higher percentage of intact transgenes capable of expressing functional CasX. In subsequent examples, combining shRNAs (more than one shRNA) on the same plasmid as the AAV transgene sequence and incorporating the shRNA, or multiple shRNAs, on another plasmid in production such as pRepCap were explored.

### Example 18: siAAVs can be Efficiently Packaged with the Use of shRNAs to Repress CRISPR Protein Activity in the Producing Cell Line

[1185] The self-cleaving AAV strategy demonstrated in Example 12 requires silencing of CasX during AAV production to avoid premature truncation of the AAV genome during production. An shRNA that efficiently silenced transgene-mediated CasX expression was identified as shRNA8 in Example 17.

[1186] The experiments in this example were performed to demonstrate that siAAV-mediated cleavage of AAV genome during packaging can be reduced via silencing of CRISPR proteins during AAV production. Furthermore, experiments were conducted to examine whether altering the shRNA promoter and/or the shRNA scaffold can result in stronger silencing of CasX expression.

### Materials and Methods

[1187] Similar methods, described in Example 17, were used for cloning shRNA sequences to generate constructs testing in this example. For FIGS. 67-71, shRNA8 sequences were cloned into a plasmid containing an EF-1α promoter and GFP reporter cassette (construct ID 17). For FIGS. 73-75, shRNA8 sequences were designed with variants of the miR-30a backbone to direct processing in the cell (versions a-d; Table 28). These shRNA sequences driven by a U6 promoter were cloned into the AatII restriction site on AAV transgene plasmids (construct ID 33). Furthermore, a subset of these resulting plasmids (construct ID 78, 82, 86, 90) were engineered to contain a tdTomato proto-spacer sequence that was preceded by an ATCN PAM (ATCN STALL site) to flank the 5′ end of the CasX nuclease construct, while a subset of plasmids (construct ID 77, 81, 85, 89) did not harbor an ATCN STALL site. As experimental controls, a scrambled shRNA was similarly cloned into plasmids with (construct ID 76, 80, 84, 88) or without the ATCN STALL site (construct ID 75, 79, 83, 87). Table 28 shows sequences of shRNA8 designed with variations in the miR-30a backbone (versions a-d) for intracellular processing. Version ‘a’ uses a miR-Scribe backbone; version ‘b’ uses miR-E; version ‘c’ uses miR-endo; version ‘d’ uses miR-30a.

TABLE 28
Sequences of shRNA8 designed with variations in the miR-30a backbone

| | siAAV | | | | |
|---|---|---|---|---|---|
| | construct | | SEQ ID | | SEQ ID |
| Name | ID | DNA sequence | NO: | RNA sequence* | NO: |
| shRNA8a | 8, 89, | GCCTAGGCAACAGAAGGC | 2885 | GCCUAGGCAACAGAAGGC | 2889 |
| | 90-116 | TAAAGAAGGTATATTGCT | | UAAAGAAGGUAUAUUGCU | |
| | | GTTGACAGTGAGCGACGT | | GUUGACAGUGAGCGACGU | |
| | | ACCTGATCATCAATTAAC | | ACCUGAUCAUCAAUUAAC | |
| | | TGTGAAGCCACAGATGGG | | UGUGAAGCCACAGAUGGG | |
| | | TTAATTGATGATCAGGTA | | UUAAUUGAUGAUCAGGUA | |
| | | CGCTGCCTACTGCCTCGG | | CGCUGCCUACUGCCUCGG | |
| | | ACTTCAAGGGGCTACTTT | | ACUUCAAGGGGCUACUUU | |
| | | AGGAGCAATTATCTTTTT | | AGGAGCAAUUAUCUUUUU | |
| | | TT | | UU | |
| shRNA8b | 77, 78, 91, | GCCTAGGCAACAGAAGGC | 2886 | GCCUAGGCAACAGAAGGC | 2890 |
| | 92, 95, 96, | TCGAGAAGGTATATTGCT | | UCGAGAAGGUAUAUUGCU | |
| | 98, 99, | GTTGACAGTGAGCGTCCT | | GUUGACAGUGAGCGUCCU | |
| | 102-105, | GTACCTGATCATCAATTA | | GUACCUGAUCAUCAAUUA | |
| | 108, 109, | TAGTGAAGCCACAGATGT | | UAGUGAAGCCACAGAUGU | |
| | 111, 112, | ATAATTGATGATCAGGTA | | AUAAUUGAUGAUCAGGUA | |
| | 115, 116 | CAGGTTGCCTACTGCCTC | | CAGGUUGCCUACUGCCUC | |
| | | GGACTTCAAGGGGGCTAC | | GGACUUCAAGGGGGCUAC | |
| | | TTTAGGAGCAATTATCTT | | UUUAGGAGCAAUUAUCUU | |
| | | TTTTT | | UUUUU | |
| shRNA8c | 85, 86, | GCCTAGGCAACAGAATGC | 2887 | GCCUAGGCAACAGAAUGC | 2891 |
| | 93-96, | TAAAGAAGGTATATTGCT | | UAAAGAAGGUAUAUUGCU | |
| | 100-103, | GTTGACAGTGAGCGACTA | | GUUGACAGUGAGCGACUA | |
| | 106-109, | ATTGATGATCAGGTACAG | | AUUGAUGAUCAGGUACAG | |
| | 113-116 | GTCTGTGAAGCCACAGAT | | GUCUGUGAAGCCACAGAU | |
| | | GGGTCCTGTACCATCATC | | GGGUCCUGUACCAUCAUC | |
| | | AATTAGCTGCCTACTGCC | | AAUUAGCUGCCUACUGCC | |
| | | TCGGACTTCAAGGGGCTA | | UCGGACUUCAAGGGGCUA | |
| | | CTTTAGGAGCAATTATCT | | CUUUAGGAGCAAUUAUCU | |
| | | TTTTTT | | UUUUUU | |
| shRNA8d | 81, 82 | GCCTAGGCAACAGAAGGC | 2888 | GCCUAGGCAACAGAAGGC | 2892 |
| | | TCGAGAAGGTATATTGCT | | UCGAGAAGGUAUAUUGCU | |
| | | GTTGACAGTGAGCGTCCT | | GUUGACAGUGAGCGUCCU | |
| | | GTACCTGATCATCAATTA | | GUACCUGAUCAUCAAUUA | |
| | | TAGTGAAGCCACAGATGT | | UAGUGAAGCCACAGAUGU | |
| | | ATAATTGATGATCAGGTA | | AUAAUUGAUGAUCAGGUA | |
| | | CAGGTTGCCTACTGCCTC | | CAGGUUGCCUACUGCCUC | |
| | | GGAATTCAAGGGGGCTAC | | GGAAUUCAAGGGGGCUAC | |
| | | TTTAGGAGCAATTATCTT | | UUUAGGAGCAAUUAUCUU | |
| | | TTTTT | | UUUUU | |

*The expected guide strand resulting from each shRNA is shown in bold.

[1188] AAV production: Vectors were produced, and their titer was determined as described in Example 12. Cell crude lysates were obtained as described in Example 17. Sequences of the various components of the vectors are listed in Tables 64-66.

### Western Blot Analysis and Quantification by Densitometry:

[1189] The protein concentration in the AAV crude lysates was measured with a Pierce 660 assay. The assay and quantification were performed as described in Example 17. For the western blot analysis in FIG. 73, total protein stain was also performed.

[1190] For FIGS. 67 and 68, to determine the expression of CasX in Lanes 2-9 as a fraction of Lane 1, the normalized band volume of Lanes 2-9 was divided by the normalized band volume of Lane 1. Lastly, to determine the fold knockdown of CasX, the normalized expression of CasX in Lane 1 was divided by the normalized expression of CasX in Lanes 2-9.

[1191] For FIGS. 74A and 74B, the expression of CasX was normalized to total protein to account for loading differences. To determine the fold knockdown of CasX, the normalized expression of CasX in Lane 1 was divided by the normalized expression of CasX in Lanes 2-19. The experimental condition in Lane 1 is the benchmarking control (AAVs produced from a construct that did not contain an shRNA transcriptional unit or an ATC STALL site).

Assessment of ssAAV Genome by NGS:

[1192] To assess the presence of edits in the packaged ssAAV genome, ssDNA was isolated from crude lysate or purified viruses by DNase I digest followed by Proteinase K incubation. 1-5 μL of ssDNA was used for amplification of AAV transgene region flanking the self-inactivating on-target spacer. The rest of the protocol was conducted per Example 12.

### Results:

[1193] The results shown in FIG. 67 and FIG. 68 demonstrate that shRNA supplementation during viral packing efficiently silenced transgene-mediated CasX expression in the producer cell line. FIG. 66 shows selected blots for antibodies specific to the CasX protein and GAPDH for normalization. Quantification of CasX knockdown levels in FIG. 68 shows that shRNA expression achieves an almost 100-fold decrease in CasX levels with shRNA8 supplementation (3:1 ratio of shRNA to transgene plasmid) and 30-fold for self-inactivating AAV.32 and AAV.33, respectively.

[1194] These results were supported by the experimental results shown in FIG. 69, which demonstrated that CasX expression knockdown correlated with increased siAAV titers. siAAVs produced without shRNA supplementation yielded 2-3-fold lower viral genomes encapsulated than siAAVs produced with shRNA supplementation in a dose-dependent manner.

[1195] The results shown in FIGS. 70A and 70B confirmed this finding: NGS analysis of the ssDNA packaged in self-inactivating AAV (AAV.33), showing that a 1:1, 1:2 or 1:3 ratio of shRNA:transgene supplemented during production led to a 90% decrease in indel rate detected in packaged ssDNA of siAAV.

[1196] shRNA-mediated decrease in self-inactivation during production improved potency of siAAV vectors as shown in FIG. 71, with over 2-fold improvement in editing relative to the transduced mNPC-tdT cells with siAAV (no shRNA supplementation during production, AAV.32, AAV33). Editing levels were more significantly improved in self-inactivation harboring two self-cleaving fragments flanking the CasX protein (AAV.32) compared to a single self-cleaving fragment at the promoter-protein junction (AAV.33), as expected.

[1197] FIG. 73 is a western blot that shows silencing of CasX expression during AAV production using AAVs that were produced from various constructs containing shRNA8. The western blot quantification of normalized CasX expression knockdown for the ‘no STALL’ and ‘ATC STALL’ constructs were illustrated in FIGS. 74A and 74B, respectively. The results in FIGS. 73 and 74 demonstrate that use of the U6 promoter to drive shRNA8 expression resulted in nearly two-fold improvement in CasX knockdown during production compared to that seen with the EF1α promoter (compare construct ID 89 and 90 with construct ID 117 and 118). Furthermore, use of constructs with an ATC STALL site resulted in a marked decrease of CasX protein levels compared to the levels detected when using constructs without a STALL site (‘No STALL’) (FIGS. 73, 74A, 74B). When comparing shRNA scaffolds (i.e., versions a-d, which contain variations in the miR-30a backbone), use of the miR-E (construct ID 75-78) and miR-Scribe (construct ID 87-90) backbones both resulted in stronger CasX knockdown compared to knockdown levels seen when using the miR-30a (construct ID 79-82) or miR-endo backbones (construct ID 83-86). These CasX knockdown findings were seen in both the ‘No STALL’ (FIG. 74A) and ‘ATC STALL’ (FIG. 74B) configuration conditions.

[1198] The data presented in FIG. 75 support the findings from the results presented in FIGS. 73 and 74; i.e., use of shRNA8 and a STALL site resulted in more intact AAV genomes during AAV production compared to conditions that incorporated just a STALL site. NGS analysis of the ssDNA packaged in siAAV supplemented with shRNA8 using a miR-E (construct ID 78) and miR-Scribe (construct ID 90) backbone and driven by U6 promoter resulted in more intact AAV genomes compared to that seen in the miR-30a (construct ID 82) and miR-endo (construct ID 86) conditions. Furthermore, using the U6 promoter with the miR-Scribe backbone (construct ID 90) resulted in ˜96% of AAV genomes that were intact, an improvement over the 88.3% seen with the corresponding EF1α promoter condition (construct ID 78). As anticipated, with the NO STALL experimental control constructs, at least ˜99% of the genome remained intact (FIG. 75).

[1199] These experiments demonstrate that shRNA8 expression during AAV production promotes a rescue of full capsid ratio during packaging, with an increase in titer correlating with increased expression of the shRNA in the producer cell line during AAV packaging. NGS and potency assay confirmed that shRNA supplementation significantly decreased self-inactivation and, therefore, more intact AAV genomes during AAV production. Furthermore, improvements in reducing CasX-mediated self-cleavage resulting in more intact AAV genomes during production can be seen when using a better-performing promoter and/or miR scaffold for shRNA expression. In addition, the results of this experiment demonstrate that inclusion of a STALL site can effectively result in CasX self-inactivation by markedly decreasing CasX protein levels, which would minimize the potential of inducing off-target effects and unwanted immunogenic outcomes.

### Example 19: Assessing Differential PAM Recognition In Vitro

### 1. Comparison of Reference and CasX Variants

[1200] In vitro cleavage assays were performed with RNPs using CasX2, CasX119, and CasX438 complexed with sg174.7.37. Fluorescently labeled dsDNA targets with a 7.37 spacer and either a TTC, CTC, GTC, or ATC PAM were used (sequences shown in Table 29). Cleavage reactions were prepared with final RNP concentrations of 100 nM and a final target concentration of 100 nM. Reactions were carried out at 370C and initiated by the addition of the 7.37 target DNA. Time points were taken at 0.25, 0.5, 1, 2, 5, 10, 30, and 60 minutes and were quenched by adding to 95% formamide, 20 mM EDTA. Samples were heat-denatured, run on a 10% urea PAGE gel, and imaged and quantified according to standard methods. Apparent first-order rate constants for non-target strand cleavage (k_{cleave}) were determined for each CasX:sgRNA complex on each target. Rate constants for targets with non-TTC PAM were compared to the TTC PAM target to determine whether the relative preference for each PAM was altered in a given protein variant.

[1201] For all variants, the TTC target supported the highest cleavage rate, followed by the ATC, then the CTC, and finally the GTC target (FIGS. 76A and B, Table 30). For each combination of CasX variant and NTC PAM, the cleavage rate kcleave is shown. For all non-NTC PAMs, the relative cleavage rate as compared to the TTC rate for that variant is shown in parentheses. All non-TTC PAMs exhibited substantially decreased cleavage rates (>10-fold for all). The ratio between the cleavage rate of a given non-TTC PAM and the TTC PAM for a specific variant remained generally consistent across all variants. The CTC target supported cleavage 3.5-4.3% as fast as the TTC target; the GTC target supported cleavage 1.0-1.4% as fast; and the ATC target supported cleavage 6.5-8.3% as fast. The exception was 491, where the kinetics of cleavage at TTC PAMs were too fast to allow accurate measurement, which artificially decreased the apparent difference between TTC and non-TTC PAMs. Comparing the relative rate of 491 with GTC, CTC, and ATC PAMs resulted in ratios comparable to those for other variants when comparing across non-TTC PAMs, consistent with the rates increasing in tandem. Overall, differences between the variants were not substantial enough to suggest that the relative preference for the various NTC PAMs were altered. However, the higher basal cleavage rates of the variants allowed targets with ATC or CTC PAMs to be cleaved nearly completely within 10 minutes, and the apparent k_{cleaves} were comparable to or greater than the k_{cleave} of CasX2 on a TTC PAM (Table 30). This increased cleavage rate may cross the threshold necessary for effective genome editing in a human cell, explaining the apparent increase in PAM flexibility for these variants.

TABLE 29
Sequences of DNA substrates used in in vitro PAM cleavage assay.

| Guide* | DNA Sequence | SEQ ID NO |
|---|---|---|
| 7.37 TTC PAM TS | AGCGCGAGCACAGCTAAGGCCACGGAGCGAGACATCTCGG | 723 |
| | CCCGAATGCTGTCAGCTTCA | |
| 7.37 TTC PAM NTS | TGAAGCTGACAGCATTCGGGCCGAGATGTCTCGCTCCGTG | 724 |
| | GCCTTAGCTGTGCTCGCGCT | |
| 7.37 CTC PAM TS | AGCGCGAGCACAGCTAAGGCCACGGAGCGAGACATCTCGG | 725 |
| | CCCGAGTGCTGTCAGCTTCA | |
| 7.37 CTC PAM NTS | TGAAGCTGACAGCACTCGGGCCGAGATGTCTCGCTCCGTG | 726 |
| | GCCTTAGCTGTGCTCGCGCT | |
| 7.37 GTC PAM TS | AGCGCGAGCACAGCTAAGGCCACGGAGCGAGACATCTCGG | 727 |
| | CCCGACTGCTGTCAGCTTCA | |
| 7.37 GTC PAM NTS | TGAAGCTGACAGCAGTCGGGCCGAGATGTCTCGCTCCGTG | 728 |
| | GCCTTAGCTGTGCTCGCGCT | |
| 7.37 ATC PAM TS | AGCGCGAGCACAGCTAAGGCCACGGAGCGAGACATCTCGG | 729 |
| | CCCGATTGCTGTCAGCTTCA | |
| 7.37 ATC PAM NTS | TGAAGCTGACAGCAATCGGGCCGAGATGTCTCGCTCCGTG | 730 |
| | GCCTTAGCTGTGCTCGCGCT | |

*The PAM sequences for each are bolded. TS-target strand. NTS-Non-target strand.

TABLE 30
Apparent cleavage rates of CasX variants against NTC PAMs

| Variant | TTC | | CTC | GTC | ATC |
|---|---|---|---|---|---|
| 2 | 0.267 | min⁻¹ | 9.29E−3 min⁻¹ | 3.75E−3 min⁻¹ | 1.87E−2 min⁻¹ |
| | | | (0.035) | (0.014) | (0.070) |
| 119 | 8.33 | min⁻¹ | 0.303 min⁻¹ | 8.64E−2 min⁻¹ | 0.540 min⁻¹ |
| | | | (0.036) | (0.010) | (0.065) |
| 438 | 4.94 | min⁻¹ | 0.212 min⁻¹ | 1.31E−2 min⁻¹ | 0.408 min⁻¹ |
| | | | (0.043) | (0.013) | (0.083) |
| 491 | 16.42 | min⁻¹ | 8.605 min⁻¹ | 2.447 min⁻¹ | 11.33 min⁻¹ |
| | | | (0.524) | (0.149) | (0.690) |

### 2. Comparison of PAM Recognition Using Single CasX Variant

[1202] Materials and Methods: Fluorescently labeled dsDNA targets with a 7.37 spacer and either a TTC, CTC, GTC, ATC, TTT, CTT, GTT, or ATT PAM were used (sequences are in Table 31). Oligos were ordered with a 5′ amino modification and labeled with a Cy7.5 NHS ester for target strand oligos and a Cy5.5 NHS ester for non-target strand oligos. dsDNA targets were formed by mixing the oligos in a 1:1 ratio in 1× cleavage buffer (20 mM Tris HCl pH 7.5, 150 mM NaCl, 1 mM TCEP, 5% glycerol, 10 mM MgCl2), heating to 95° C. for 10 minutes, and allowing the solution to cool to room temperature.

[1203] CasX variant 491 was complexed with sg174.7.37. The guide was diluted in 1× cleavage buffer to a final concentration of 1.5 μM, and then protein was added to a final concentration of 1 μM. The RNP was incubated at 37° C. for 10 minutes and then put on ice.

[1204] Cleavage assays were carried out by diluting RNP in cleavage buffer to a final concentration of 200 nM and adding dsDNA target to a final concentration of 10 nM. Time points were taken at 0.25, 0.5, 1, 2, 5, and 10 minutes and quenched by adding to an equal volume of 95% formamide and 20 mM EDTA Results

[1205] The relative cleavage rate of the 491.174 RNP on various PAMs was investigated. In addition to aiding in the prediction of cleavage efficiencies of targets and potential off-targets in cells, these data allowed for the adjustment of the cleavage rate for synthetic targets. In the case of self-limiting AAV vectors, where new protospacers can be added within the vector to allow for self-targeting, it was reasoned that the rate of episome cleavage could be adjusted up or down by changing the PAM.

[1206] The cleavage rate of the RNP was tested against various dsDNA substrates that were identical in sequence aside from the PAM. This experimental setup allowed for the isolation of the effects of the PAM itself, rather than convoluting PAM recognition with effects resulting from spacer sequence and genomic context. All NTC and NTT PAMs were tested. As expected, the RNP cleaved the target with the TTC PAM most quickly, converting essentially all of it to product by the first time point (FIG. 76A). CTC was cleaved roughly half as quickly, though the rapid cleavage of TTC makes determining an accurate k_{cleave} difficult under these assay conditions, which are optimized to capture a broader array of cleavage rates (Table 32). The GTC target was cleaved most slowly of the NTC PAMs, with a cleavage rate roughly six-fold slower than the TTC target. All NTT PAMs were cleaved more slowly than all NTC PAMs (FIG. 76B), with TTT cut most efficiently, followed by GTT (Table 32). The relative efficiency of GTT cleavage among all NTT PAMs, compared to the low rate of GTC cleavage compared to all NTC PAMs, demonstrating that recognition of individual PAM nucleotides was context-dependent, with nucleotide identity at one position in the PAM affecting sequence preference at the other positions.

[1207] The PAM sequences tested here yielded cleavage rates spanning three orders of magnitude while still maintaining cleavage activity at the same spacer sequence. These data demonstrated that cleavage rates at a given synthetic target can be readily modified by changing the associated PAM, allowing for adjustment of self-cleavage activity and efficient targeting of the genomic target, prior to cleavage and elimination of the AAV episome.

TABLE 31
Sequences of DNA substrates used in in vitro PAM cleavage assay*

| | SEQ ID | |
|---|---|---|
| PAM & Strand | NO | Spacer and PAM Sequence |
| 7.37 TTC PAM TS | 731 | AGCGCGAGCACAGCTAAGGCCACGGAGCGAGACATCTCGGCCCGAATGCTG |
| | | TCAGCTTCA |
| 7.37 TTC PAM NTS | 732 | TGAAGCTGACAGCATTCGGGCCGAGATGTCTCGCTCCGTGGCCTTAGCTGT |
| | | GCTCGCGCT |
| 7.37 CTC PAM TS | 733 | AGCGCGAGCACAGCTAAGGCCACGGAGCGAGACATCTCGGCCCGAGTGCTG |
| | | TCAGCTTCA |
| 7.37 CTC PAM NTS | 734 | TGAAGCTGACAGCACTCGGGCCGAGATGTCTCGCTCCGTGGCCTTAGCTGT |
| | | GCTCGCGCT |
| 7.37 GTC PAM TS | 735 | AGCGCGAGCACAGCTAAGGCCACGGAGCGAGACATCTCGGCCCGACTGCTG |
| | | TCAGCTTCA |
| 7.37 GTC PAM NTS | 736 | TGAAGCTGACAGCAGTCGGGCCGAGATGTCTCGCTCCGTGGCCTTAGCTGT |
| | | GCTCGCGCT |
| 7.37 ATC PAM TS | 737 | AGCGCGAGCACAGCTAAGGCCACGGAGCGAGACATCTCGGCCCGATTGCTG |
| | | TCAGCTTCA |
| 7.37 ATC PAM NTS | 738 | TGAAGCTGACAGCAATCGGGCCGAGATGTCTCGCTCCGTGGCCTTAGCTGT |
| | | GCTCGCGCT |
| 7.37 TTT PAM TS | 739 | AGCGCGAGCACAGCTAAGGCCACGGAGCGAGACATCTCGGCCCAAATGCTG |
| | | TCAGCTTCA |
| 7.37 TTT PAM NTS | 740 | TGAAGCTGACAGCATTTGGGCCGAGATGTCTCGCTCCGTGGCCTTAGCTGT |
| | | GCTCGCGCT |
| 7.37 CTT PAM TS | 741 | AGCGCGAGCACAGCTAAGGCCACGGAGCGAGACATCTCGGCCCTAGTGCTG |
| | | TCAGCTTCA |
| 7.37 CTT PAM NTS | 742 | TGAAGCTGACAGCACTTGGGCCGAGATGTCTCGCTCCGTGGCCTTAGCTGT |
| | | GCTCGCGCT |
| 7.37 GTT PAM TS | 743 | AGCGCGAGCACAGCTAAGGCCACGGAGCGAGACATCTCGGCCCTACTGCTG |
| | | TCAGCTTCA |
| 7.37 GTT PAM NTS | 744 | TGAAGCTGACAGCAGTTGGGCCGAGATGTCTCGCTCCGTGGCCTTAGCTGT |
| | | GCTCGCGCT |
| 7.37 ATT PAM TS | 745 | AGCGCGAGCACAGCTAAGGCCACGGAGCGAGACATCTCGGCCCTATTGCTG |
| | | TCAGCTTCA |
| 7.37 ATT PAM NTS | 746 | TGAAGCTGACAGCAATTGGGCCGAGATGTCTCGCTCCGTGGCCTTAGCTGT |
| | | GCTCGCGCT |

*The DNA sequences used to generate each dsDNA substrate are shown. The PAM sequences for each are bolded. TS-target strand. NTS-Non-target strand.

TABLE 32
Apparent cleavage rates of CasX 491.174 against NTC and NTT PAMs

| PAM | TTC | ATC | CTC | GTC | TTT | ATT | CTT | GTT |
|---|---|---|---|---|---|---|---|---|
| k_{cleave} (min⁻¹) | 15.6* | 6.66 | 9.45 | 2.52 | 1.33 | 0.0675 | 0.0204 | 0.330 |

*The rate of TTC cleavage exceeds the resolution of this assay, so the resulting k_{cleave} should be taken as a lower bound.

### Example 20: The PASS Assay Identifies CasX Protein Variants of Differing PAM Sequence Specificity

[1208] The purpose of the experiment was to identify the PAM sequence specificities of CasX proteins 2 (SEQ ID NO: 2), 491 (SEQ ID NO: 138), 515 (SEQ ID NO: 145), 533 (SEQ ID NO: 162), 535 (SEQ ID NO: 164), 668 (SEQ ID NO: 296), and 672 (SEQ ID NO: 299). To accomplish this, the HEK293 cell line PASS_V1.01 or PASS_V1.02 was treated with the above CasX proteins in at least two replicate experiments, and Next-generation sequencing (NGS) was performed to calculate the percent editing using a variety of spacers at their intended target sites.

### Materials and Methods

[1209] A multiplexed pooled approach was taken to assay clonal protein variants using the PASS system. Briefly, two pooled HEK cell lines were generated and termed PASS_V1.01 and PASS_V1.02. Each cell within the pool contained a genome-integrated single-guide RNA (sgRNA), paired with a specific target site. After transfection of protein-expression constructs, editing at a specific target by a specific spacer could be quantified by NGS. Each guide-target pair was designed to provide data related to activity, specificity, and targetability of the CasX-guide RNP complex.

[1210] Paired spacer-target sequences were synthesized by Twist Biosciences and obtained as an equimolar pool of oligonucleotides. This pool was amplified by PCR and cloned by Golden Gate cloning to generate a final library of plasmids named p77. Each plasmid contained a sgRNA expression element and a target site, along with a GFP expression element. The sgRNA expression element consisted of a U6 promoter driving transcription of gRNA scaffold 174 (SEQ ID NO:2238), followed by a spacer sequence which would target the RNP of the guide and CasX variant to the intended target site. 250 possible unique, paired spacer-target synthetic sequences were designed and synthesized. A pool of lentivirus was then produced from this plasmid library using the LentiX production system (Takara Bio USA, Inc) according to the manufacturer's instructions. The resulting viral preparation was then quantified by qPCR and transduced into a standard HEK293 cell line at a low multiplicity of infection so as to generate single copy integrations. The resulting cell line was then purified by fluorescence-activated cell sorting (FACS) to complete the production of PASS_V1.01 or PASS_V1.02. A cell line was then seeded in six-well plate format and treated in duplicate with either water or was transfected with 2 μg of plasmid p67. Plasmid p67 contains an EF-1alpha promoter driving expression of a CasX protein tagged with the SV40 Nuclear Localization Sequence. After two days, treated cells were collected, lysed, and genomic DNA was extracted using a genomic DNA isolation kit. Genomic DNA was then PCR amplified with custom primers to generate amplicons compatible with Illumina™ NGS and sequenced on a NextSeq instrument. Sample reads were demultiplexed and filtered for quality. Editing outcome metrics (fraction of reads with indels) were then quantified for each spacer-target synthetic sequence across treated samples.

[1211] To assess the PAM sequence specificity for a CasX protein, editing outcome metrics for four different PAM sequences were categorized. For TTC PAM target sites, 48 different spacer-target pairs were quantified; for ATC, CTC, and GTC PAM target sites, 14, 22, and 11 individual target sites were quantified, respectively. For some CasX proteins, replicate experiments were repeated dozens of times over several months. For each of these experiments, the average editing efficiency was calculated for each of the above described spacers. The average editing efficiency across the four categories of PAM sequence was then calculated from all such experiments, along with the standard deviation of these measurements.

### Results:

[1212] Table 33 lists the average editing efficiency across PAM categories and across CasX protein variants, along with the standard deviation of these measurements. The number of measurements for each category is also indicated. These data indicate that the engineered CasX variants 491 and 515 are specific for the canonical PAM sequence TTC, while other engineered variants of CasX performed more or less efficiently at the PAM sequences tested. In particular, the average rank order of PAM preferences for CasX 491 is TTC>>ATC>CTC>GTC, or TTC a ATC>GTC>CTC for CasX 515, while the wild-type CasX 2 exhibits an average rank order of TTC>>GTC>CTC>ATC. Note that for the lower editing PAM sequences the error of these average measurements is high. In contrast, CasX variants 535, 668, and 672 have considerably broader PAM recognition, with a rank order of TTC>CTC>ATC>GTC. Finally, CasX 533 exhibits a completely re-ordered ranking relative to the WT CasX, ATC>CTC>>GTC>TTC. These data can be used to engineer maximally-active therapeutic CasX molecules for a target DNA sequence of interest.

[1213] Under the conditions of the experiments, a set of CasX proteins was identified that are improved for double-stranded DNA cleavage in human cells at target DNA sequences associated with a PAM of sequence TTC, ATC, CTC, or GTC, supporting that CasX variants with an altered spectrum of PAM specificity, relative to wild-type CasX, can be generated.

TABLE 33
Average editing of selected CasX Proteins at spacers associated
with PAM sequences of TTC, ATC, CTC, or GTC

| CasX | PAM | Average Percent | Standard | Number of |
|---|---|---|---|---|
| Name | Sequence | Editing | Deviation | Measurements |
| 2 | ATC | 0.40 | 1.35 | 336 |
| 2 | CTC | 0.46 | 2.29 | 528 |
| 2 | GTC | 0.69 | 6.27 | 264 |
| 2 | TTC | 5.28 | 7.34 | 1152 |
| 491 | ATC | 6.86 | 8.29 | 364 |
| 491 | CTC | 4.54 | 6.40 | 572 |
| 491 | GTC | 3.40 | 6.68 | 286 |
| 491 | TTC | 40.41 | 23.13 | 1248 |
| 515 | ATC | 4.47 | 5.49 | 252 |
| 515 | CTC | 3.36 | 4.80 | 396 |
| 515 | GTC | 3.65 | 10.75 | 198 |
| 515 | TTC | 36.75 | 24.89 | 864 |
| 533 | ATC | 47.50 | 15.86 | 96 |
| 533 | CTC | 25.90 | 14.74 | 28 |
| 533 | GTC | 6.34 | 8.36 | 44 |
| 533 | TTC | 0.87 | 3.05 | 22 |
| 535 | ATC | 9.70 | 10.20 | 56 |
| 535 | CTC | 11.77 | 13.59 | 88 |
| 535 | GTC | 7.62 | 15.04 | 44 |
| 535 | TTC | 29.29 | 18.78 | 192 |
| 668 | ATC | 44.69 | 24.40 | 56 |
| 668 | CTC | 46.14 | 26.57 | 88 |
| 668 | GTC | 30.48 | 24.06 | 44 |
| 668 | TTC | 55.34 | 28.59 | 192 |
| 672 | ATC | 25.51 | 20.85 | 56 |
| 672 | CTC | 30.05 | 22.95 | 88 |
| 672 | GTC | 14.21 | 13.38 | 44 |
| 672 | TTC | 52.36 | 27.64 | 192 |

### Example 21: In Vivo Administration of the siAAV-CasX (siAAV) System Results in Efficient Editing at the Target Locus while Inducing CasX Self-Inactivation In Vivo

[1214] Experiments were performed to demonstrate that small CRISPR proteins such as CasX with targeting gRNA can edit the target genomic locus when expressed in vivo from an AAV episome with a self-inactivating system. Furthermore, these experiments showed that the AAV self-inactivation system is capable of reducing CasX expression in vivo to minimize potential off-target effects, thereby enhancing the therapeutic index of the constructs.

### Materials and Methods

[1215] AAVs encoding CasX variant 491 with guide scaffold 174 and spacer 12.7 targeting the tdTomato locus in Ai9 transgenic mice were used in these in vivo experiments. AAV construct cloning and AAV production using adherent HEK293T cells were performed as described in Example 1. Sequences of AAV constructs used in this experiment are listed in Table 66.

In Vivo Administration of siAAVs, Tissue Processing, and Immunohistochemistry (IHC):

[1216] The Ai9 mouse model was used in this example. Ai9 is a Cre reporter tool strain designed to have a loxP flanked STOP cassette preventing the transcription of a CAG promoter-driven tdTomato marker. These mice express tdTomato following Cre-mediated recombination to remove the STOP cassette. To assess in vivo siAAV editing, neonates from Ai9 reporter mice were injected with siAAV particles encoding CasX variant 491 driven by the UbC promoter and gRNA scaffold variant 174 with spacer 12.7 targeting the tdTomato STOP cassette (refer to Table 66 for sequences). Here, the CasX construct was engineered such that the CasX coding sequence was flanked on both the 5′ and 3′ ends by a tdTomato proto-spacer sequence, which was preceded by either an ATCN or CTCN PAM (labeled as ‘Dual ATC STALL’ or ‘Dual CTC STALL’ respectively). In addition, another CasX construct was designed where the CasX sequence was flanked only on the 5′ end by a tdTomato proto-spacer site with an ATC PAM (‘single ATC STALL’). As a control, a CasX construct without the flanking tdTomato protospacer sequences for self-inactivation was used (‘No STALL’). ‘Dual ATC STALL’ construct is denoted with construct ID 136; ‘Dual CTC STALL’ is denoted with construct ID 137; ‘single ATC STALL’ is denoted with construct ID 90; and ‘no STALL’ is denoted with construct ID 30.

[1217] Briefly, ˜4E9 siAAV particles were administered intracerebroventricularly into Ai9 neonates. As another control group, neonates were injected with AAVs (construct ID 147; Table 66) containing CasX 491 and gRNA scaffold 235 with a non-targeting spacer (spacer 0.0, CGAGACGUAAUUACGUCUCG (SEQ ID NO: 2893)). Three weeks and eight weeks post-injection, mice were euthanized by terminal anesthesia followed by transcardiac perfusion. Brains were harvested and cut along the midline into left and right hemispheres. The left hemisphere of the brain was post-fixed in 4% paraformaldehyde at 4° C., followed by infiltration with 30% sucrose solution. Tissues were embedded in the OCT compound and frozen; OCT-embedded brains were cross-sectioned using a cryostat. Sections were counterstained with DAPI to label nuclei, mounted on slides, and imaged on a fluorescent microscope. Editing levels were quantified by counting the number of tdTomato+ cells as a percentage of DAPI-labeled nuclei. The right hemisphere of the brain was harvested and processed for extraction of 1) RNA using the Zymo Quick-RNA™ Miniprep Kit following the manufacturer's instructions and 2) protein using standard molecular techniques involving acetone precipitation.

### Assessment of RNA Levels by RT-qPCR:

[1218] RNA extracted from brain tissue was used as input for reverse transcription. The resulting cDNA served as input for qPCR reactions to quantify the amount of transcribed CasX, guide scaffold 174, and tdTomato, using HEX/FAM-based detection with primers-probe sets targeting CasX, guide scaffold 174, or tdTomato. Expression of the ACTB housekeeping gene was used for normalization. Expression data were analyzed according to the double delta Ct method.

### Western Blotting and Protein Quantification:

[1219] Extracted tissue protein samples were resolved by SDS-PAGE followed by Western blotting using an in-house polyclonal antibody recognizing CasX to analyze the levels of CasX protein. Western blotting and quantification of band intensity was performed using standard procedures. CasX protein knockdown was determined for each siAAV condition (Dual ATC STALL, Dual CTC STALL, or Single ATC STALL) and normalized to the CasX protein level for the AAV without self-inactivation (No STALL) control.

### Results:

[1220] The bar plots in FIGS. 77A and 77B illustrate the quantification of RNA transcript levels for CasX, gRNA scaffold 174, and tdTomato in mouse brain tissue harvested three weeks (FIG. 77A) and eight weeks (FIG. 77B) post-treatment with XAAVs with or without the self-inactivation system. The data illustrate that CasX and gRNA expression in the No STALL group was approximately four times greater than the CasX and gRNA expression exhibited by the Dual ATC STALL group, Dual CTC STALL group, or Single ATC STALL group at both the three-week and eight-week time points (FIGS. 77A and 77B). However, tdTomato expression was comparable across all four groups, regardless of STALL presence. Collectively, these data indicate that siAAV constructs were able to reduce CasX and gRNA expression without significantly affecting editing at the tdTomato locus to induce tdTomato expression, supporting that the design of the constructs permits the desired target editing and subsequent inactivation to reduce the expression of the CasX and gRNA in vivo.

[1221] The bar plot in FIG. 78 shows the quantification of CasX protein expression in mouse brain tissue harvested at the three-week time point. These data corroborate the RT-qPCR findings in FIGS. 77A and 77B, such that incorporation of the self-inactivation system (Dual ATC STALL, Dual CTC STALL, or Single ATC STALL) resulted in the reduction of CasX protein levels compared to CasX levels detected in the No STALL group. Specifically, the Dual ATC STALL group exhibited a ˜2.55-fold decrease in CasX protein levels, while the Dual CTC STALL group showed a ˜9.1-fold reduction relative to the CasX levels with the No STALL group (FIG. 78). These results suggest that CasX has a relatively lower binding affinity with ATC PAM compared to CTC PAM, and thus, a weaker self-inactivating activity and lower relative CasX knockdown. Interestingly, the data also suggest that incorporating a single ATC STALL site resulted in more effective reduction of CasX expression than using two STALL sites at the three-week time point (FIG. 78).

[1222] The bar graph in FIG. 79 is a quantification of tdTomato+ cells detected in the harvested brain tissue from mice treated with XAAVs with or without the self-inactivation system. The data show that the percentage of cells expressing tdTomato was similar across all the groups treated with XAAVs containing the tdTomato-targeting spacer, regardless of the presence of self-inactivation (FIG. 79), supporting the RT-qPCR data discussed earlier in FIGS. 77A and 77B. As expected, mice treated with XAAVs containing the non-targeting spacer did not exhibit tdTomato expression (FIG. 79).

[1223] These experiments demonstrated that administering siAAVs in vivo can result in efficient editing at the target genomic locus mediated by the CasX:gRNA system, while also effectively modulating CasX expression via the self-inactivation system to minimize potential off-target effects and undesired immunogenicity, enhancing the therapeutic index of the constructs.

### Example 22: Assessment of Using Decoy gRNAs to Rescue siAAV Titers During Production

[1224] Experiments were performed to investigate alternative strategies that may be employed to circumvent CasX-mediated cleavage of the AAV transgene by reducing CasX editing without decreasing its expression during AAV production. One strategy involves designing decoy gRNAs with a non-targeting spacer or without a spacer, which, upon expression, would complex with the CasX to prevent CasX from targeting the STALL sites flanking the nuclease construct. FIG. 80 illustrates a general configuration of a construct that would encode for a decoy gRNA, supplied on the same plasmid as the AAV transgene, to rescue siAAV titers that remain functional during production.

### Materials and Methods

[1225] AAV plasmid cloning was performed using standard molecular cloning methods described in Example 17. Briefly, as illustrated in FIG. 80, the siAAV transgene plasmid was designed to contain a U6 transcriptional unit upstream (5′) of the 5′ ITR, where the construct encoding a decoy gRNA is driven by the U6 promoter. Sequences of the decoy gRNAs designed and investigated in this example are listed in Table 34.

TABLE 34
Sequences of decoy gRNAs with the
indicated guide scaffold variants.

| siAAV | Decoy gRNA design | | |
|---|---|---|---|
| construct ID | (scaffold-spacer) | DNA SEQ ID NO | RNA SEQ ID NO |
| 126 | Scrambled-NT | 2894 | 4007 |
| 127 | Scrambled-NS | 2895 | 4008 |
| 128 | Scrambled-NT | 2896 | 4007 |
| 129 | Scrambled-NS | 2897 | 4008 |
| 130 | 174-NT | 2898 | 4009 |
| 131 | 174-NS | 2899 | 4010 |
| 132 | 234-NT | 2900 | 4011 |
| 133 | 234-NS | 2901 | 4012 |
| 134 | 235-NT | 2902 | 4013 |
| 135 | 235-NS | 2903 | 4014 |

NT = non-targeting spacer;
NS = no spacer

[1226] AAV vector production was performed as described in Example 1. In addition to encoding for decoy gRNAs listed in Table 34, the resulting AAVs tested in this example harbored a self-inactivation system where the CasX nuclease construct was flanked on both the 5′ and 3′ ends by a tdTomato proto-spacer sequence preceded by a TTCN PAM. The resulting siAAVs encoded for CasX 491 with gRNA scaffold 174 and spacer 12.7. AAVs without the self-inactivation system or siAAVs without the decoy gRNA were produced and used as experimental controls. Viral genome titer was determined using similar methods as described earlier in Example 1. Here, primer-probe sets were designed to amplify the 3′ region of the CasX locus and the bGH poly(A) signal sequence. The ratio of CasX titer to bGH titer was determined for each condition and normalized to the AAV control with no STALL or decoy gRNA. Experimental conditions tested in this example are outlined below the bar chart in FIG. 81.

### Results:

[1227] FIG. 81 illustrates the calculated ratios of CasX titer to bGH titer for the indicated experimental conditions that employed the decoy gRNA strategy for bypassing CasX-mediated cleavage of the AAV transgene during production. The findings show that decoy gRNAs with scaffold 234 or 235 and either a non-targeting or no spacer (construct ID 132-135) were able to restore viral titer when compared to the siAAV titer determined for the scrambled decoy gRNA conditions (construct ID 128 and 129). Interestingly, decoy gRNAs with scaffold 174 were unable to rescue siAAV titer, indicating that enhanced gRNA scaffolds (here, scaffold variants 234 and 235) used for designing decoy gRNAs resulted in more effective binding to CasX to reduce CasX-mediated editing activity.

[1228] These experiments demonstrated that using decoy gRNAs to rescue siAAV titer during siAAV production is a viable alternative strategy to minimize CasX-mediated self-cleavage of the AAV transgene without reducing CasX expression. Furthermore, the data show that using an improved gRNA scaffold as part of the decoy gRNA promotes stronger binding with CasX to prevent CasX from editing the STALL sites during production. Future studies may investigate the effects of using a combinatorial strategy involving both shRNAs and decoy gRNAs to reduce CasX-mediated self-cleavage of the AAV transgene during production.

### Example 23: CpG-Depleted AAVs Demonstrate CasX-Mediated Editing In Vitro

[1229] Pathogen-associated molecular patterns (PAMPs) such as unmethylated CpG motifs are small molecular motifs conserved within a class of microbes. They are recognized by toll-like receptors (TLRs) and other pattern recognition receptors in eukaryotes and often induce a non-specific immune activation. In the context of gene therapy, therapeutics containing PAMPs are often not as well-tolerated and are rapidly cleared from the patient given the strong immune response triggered, which ultimately leads to reduced therapeutic efficiency. As a result, there is an unmet need for well-tolerated gene therapy vectors that are not cleared rapidly to achieve the necessary therapeutic benefit.

[1230] CpG motifs are short single-stranded DNA sequences containing the dinucleotide CG. When these CpG motifs are unmethylated, they act as PAMPs and therefore potently stimulate the immune response. In this example, experiments were performed to deplete CpG motifs in the AAV construct encoding CasX variant 491, guide scaffold variant 235, and spacer 7.37 targeting the endogenous B2M (beta-2-microglobulin) locus and demonstrate that CpG-depleted AAV vectors were able to edit effectively in vitro. The editing activity induced from use of the individual elements of the AAV genome and their respective CpG-reduced versions, as well as stacking of these elements, was assessed in vitro. In vitro assessment of immunogenicity is presented in Example 24.

### Materials and Methods

### Design of CpG-Depleted AAV Plasmids:

[1231] Nucleotide substitutions to replace native CpG motifs in AAV components were designed in silico. For exemplary regulatory elements, nucleotide substitutions to replace native CpG motifs were designed based on homologous nucleotide sequences from related species to produce CpG-reduced variants for the following elements: the murine U1a snRNA (small nuclear RNA) gene promoter, the human UbC (polyubiquitin C) gene promoter, and the human U6 promoter. See Table 35, which provides parental sequences of a murine U1a promoter, a human UbC promoter, and a human U6 promoter prior to CpG reduction and Table 36, which provides sequences of CpG-reduced variants of the promoters listed in Table 35. Similar modifications were made to produce a CpG-reduced variant of a bGHpA (bovine growth hormone polyadenylation) sequence. See Table 37, which provides a parental sequence of a bGHpA prior to CpG reduction and Table 38, which provides a sequence of a CpG-reduced variant of the bGHpA listed in Table 37.

[1232] AAV2 ITRs were CpG-depleted as previously described (Pan X, Yue Y, Boftsi M. et al., 2021, Rational engineering of a functional CpG-free ITR for AAV gene therapy. Gene Ther.) See Table 39, which provides parental ITR sequences prior to CpG reduction and Table 40, which provides sequences of CpG-reduced variants of the ITRs listed in Table 39.

[1233] Nucleotide substitutions to replace native CpG motifs in exemplary Cas protein variants (CasX variants) were rationally designed with codon optimization, so that the amino acid sequence of the CpG-reduced Cas-encoding sequence would be the same as the amino acid sequence of the corresponding native Cas-encoding sequence. See Table 41, which provides parental Cas sequences prior to CpG reduction and Table 42, which provides sequences of CpG-reduced variants of the Cas proteins listed in Table 41. Furthermore, nucleotide substitutions to replace native CpG motifs within the base gRNA scaffold variants (gRNA scaffold 235 and 316) were rationally designed with the intent to preserve editing activity. The rational design process for the CpG reduction of the gRNA sequences is further described herein below. See Table 43, which provides parental gRNA sequences prior to CpG reduction and Table 44, which provides sequences of CpG-reduced variants of the gRNAs listed in Table 43.

[1234] All resulting sequences were ordered from a third-party commercial source as synthesized gene fragments with the appropriate overhangs for cloning and isothermal assembly to replace individually the corresponding elements of the existing base AAV plasmid (construct ID 183). Spacer 7.37 (GGCCGAGAUGUCUCGCUCCG; SEQ ID NO: 2709), which targets the endogenous B2M gene, was used for the relevant experiments discussed in this example. The resulting AAV constructs were generated using standard molecular cloning techniques. Cloned and sequence-validated plasmid constructs were midi-prepped for subsequent nucleofection and AAV vector production.

TABLE 35
Parental sequences of promoters

| Parental element | DNA SEQ ID NO: |
|---|---|
| Parental UbC promoter (human) | 464 |
| Parental U1A promoter (murine) | 2930 |
| Parental U6 promoter (human) | 661 |

TABLE 36
Sequences of CpG-reduced or depleted promoters

| | AAV | |
|---|---|---|
| CpG-reduced or depleted | construct | |
| element | ID: | DNA SEQ ID NO: |
| CpG-reduced UbC promoter | 184 | 2904 |
| (human) | | |
| Strongly CpG-reduced UbC | 185 | 2905 |
| promoter (human) | | |
| CpG-depleted UbC promoter | 186 | 2906 |
| (human) | | |
| CpG-reduced U1a promoter | 178, 206 | 2907 |
| (murine) | | |
| CpG-depleted U1a promoter | 179, 205 | 2908 |
| (murine) | | |
| CpG-reduced U6 promoter | 180 | 2909 |
| (human) | | |
| CpG-depleted U6 promoter | 181, 205, 206 | 2910 |
| (human) | | |
| CpG-reduced | — | 2911 |
| hU6 Isoform 2 | | |
| CpG-depleted hU6 Isoform 2 | — | 2912 |
| CpG-depleted hU6 Isoform 3 | — | 2913 |
| CpG-depleted hU6 Isoform 4 | — | 2914 |
| CpG-depleted hU6 Isoform 5 | — | 2915 |

TABLE 37
Parental sequence for Poly(A) signal sequence

| Parental element | DNA SEQ ID NO: |
|---|---|
| Parental bGH-polyA sequence (bovine) | 514 |

TABLE 38
Sequences of CpG-reduced Poly(A) signal sequence

| CpG-reduced or | | |
|---|---|---|
| depleted element | AAV construct ID: | DNA SEQ ID NO: |
| CpG-depleted bGH-polyA | 182, 205, 206 | 2917 |
| sequence (bovine) | | |

TABLE 39
Sequences of parental AAV ITR sequences

| Parental element | DNA SEQ ID NO: |
|---|---|
| 5′ITR | 423 |
| 3′ITR | 424 |

TABLE 40
Sequences of CpG-reduced or depleted AAV ITR sequences

| CpG-reduced or depleted element | DNA SEQ ID NO: |
|---|---|
| CpG-depleted 5′ITR | 2918 |
| CpG-depleted 3′ITR | 2919 |

TABLE 41
Parental sequences of CasX proteins

| Parental element | DNA SEQ ID NO: |
|---|---|
| CasX 491 | 749 |
| CasX 515 | 4015 |
| CasX 676 | 4016 |
| CasX 593 | 4017 |
| CasX 812 | 4018 |
| CasX 668 | 4019 |
| CasX 672 | 4020 |

TABLE 42
CpG-depleted sequences of CasX proteins

| | AAV | |
|---|---|---|
| | construct | |
| CpG-depleted element | ID: | DNA SEQ ID NO: |
| CpG-depleted CasX 491 | 205, 206 | 4021 |
| CpG-depleted CasX 515 | — | 4022 |
| CpG-depleted CasX 593 | — | 4023 |
| CpG-depleted CasX 812 | — | 4024 |
| CpG-depleted CasX 668 | — | 4025 |
| CpG-depleted CasX 676 | — | 4026 |
| CpG-depleted CasX 672 | — | 4027 |

TABLE 43
Parental sequences of gRNA scaffolds

| Parental element | DNA SEQ ID NO: |
|---|---|
| Scaffold 235 | 698 |
| Scaffold 316 | 4028 |

TABLE 44
Sequences of CpG-reduced or depleted gRNA scaffolds.

| | Derived from parent | |
|---|---|---|
| Scaffold ID: | scaffold: | DNA SEQ ID NO: |
| Scaffold 320 | Scaffold 235 | 4029 |
| Scaffold 321 | Scaffold 235 | 4030 |
| Scaffold 322 | Scaffold 235 | 4031 |
| Scaffold 323 | Scaffold 316 | 4032 |
| Scaffold 324 | Scaffold 235 | 4033 |
| Scaffold 325 | Scaffold 235 | 4034 |
| Scaffold 326 | Scaffold 316 | 4035 |
| Scaffold 327 | Scaffold 235 | 4036 |
| Scaffold 328 | Scaffold 235 | 4037 |
| Scaffold 329 | Scaffold 316 | 4038 |
| Scaffold 330 | Scaffold 235 | 4039 |
| Scaffold 331 | Scaffold 235 | 4040 |
| Scaffold 332 | Scaffold 316 | 4041 |
| Scaffold 333 | Scaffold 235 | 4042 |
| Scaffold 334 | Scaffold 235 | 4043 |
| Scaffold 335 | Scaffold 316 | 4044 |
| Scaffold 336 | Scaffold 235 | 4045 |
| Scaffold 337 | Scaffold 235 | 4046 |
| Scaffold 338 | Scaffold 316 | 4047 |
| Scaffold 339 | Scaffold 235 | 4048 |
| Scaffold 340 | Scaffold 235 | 4049 |
| Scaffold 341 | Scaffold 316 | 4050 |

### Design of CpG-Depleted Guide Scaffolds:

[1235] Nucleotide substitutions were rationally-designed to replace native CpG motifs within the base gRNA scaffold variant (gRNA scaffold 235) with the intent to preserve editing activity while reducing scaffold immunogenicity. CpG-motifs were removed from the scaffold coding sequence to reduce immunogenicity. Scaffold 235 contains a total of eight CpG elements; six of which are predicted to basepair and form complementary strands of a double-stranded secondary structure (FIG. 110A). Therefore, the six basepairing CpGs forming three pairs were mutated in concert to maintain these double-stranded secondary structures. These mutations reduced the count of independent CpG-containing regions to five (three CpG pairs and two single CpGs) to be considered independently for CpG-removal. Specifically, mutations were designed in (1) the pseudoknot stem, (2) the scaffold stem, (3) the extended stem bubble, (4) the extended step, and (5) the extended stem loop, as diagrammed in FIG. 110B and described in detail below.

[1236] In the pseudoknot stem (region 1), the CpG pair was flipped to a GpC to minimize the alteration of the base composition and sequence. Based on previous experiments involving replacing individual base pairs, it was anticipated that this mutation was not likely to be detrimental to the structure and function of the guide RNA scaffold.

[1237] Similarly, in the scaffold stem (region 2) the CpG pair was flipped to a GpC to minimize the alteration of the base composition and sequence. It was anticipated that this mutation was likely to be detrimental to the structure and function of the guide RNA scaffold because strong sequence conservation was seen in this region in previous experiments mutating individual bases or base pairs. This strong sequence conservation is likely due to the scaffold stem loop being important in interacting with the CasX protein as well as in the formation of a triplex structural element with the pseudoknot region.

[1238] In the extended stem bubble (region 3) the single CpG was removed by one of three strategies. First, the bubble was deleted by mutating CG→C (removing the guanine from the CpG dinucleotide). Second, the bubble was resolved to restore ideal basepairing by mutating CG→CT (substituting thymine for guanine in the CpG dinucleoide). Third, the entire extended stem loop was replaced with the extended stem loop of scaffold 174. Note that, by itself, the replacement of the extended stem loop with that of scaffold 174 recapitulates scaffold 316, which has previously been shown to edit efficiently. There are no CpG motifs in the extended stem loop of scaffold 174. Therefore, replacing the extended stem loop with that of scaffold 174 also removes the CpG motif in the extended stem (region 4). Based on previous experiments showing the relative robustness of the extended stem to small changes, it was anticipated that mutating the extended stem bubble was moderately likely to be detrimental to the structure and function of the guide RNA scaffold.

[1239] In the extended stem (region 4), the CpG pair could not be flipped to GpC without generating additional CpG motifs. Therefore, the CpGs were changed to a GG and a complementary CC motif. Similar to region 3, based on the relative robustness of the extended stem to small changes, it was anticipated that this mutation was not likely to be detrimental to the structure and function of the guide RNA scaffold.

[1240] Finally, the extended stem loop (region 5) was mutated in one of three ways that were designed based on previous experiments examining the stability of the stem loop. In particular, several variations of the stem loop had previously been shown to have similar stability levels, and some of these variations of the stem loop do not contain CpGs. Based on these findings, first, the loop was replaced with a new loop with a CUUG sequence. Second, the loop was replaced with a new loop with a GAAA sequence. Since the GAAA loop replacement would generate a novel CpG adjacent to the loop, it was combined with a C→G base swap and the corresponding G→C base swap on the complementary strand, ultimately resulting in a CUUCGG→GGAAAC exchange. Third, the loop was mutated by the insertion of an A to interrupt the CpG motif and thereby increase the size of the loop from 4 to 5 bases. It was anticipated that randomly mutating the extended stem loop would likely have detrimental effects on secondary structure stability and hence on editing. However, relying on previously confirmed sequences was believed to have a lower risk associated with a replacement.

[1241] To generate guide RNA scaffolds encoded by DNA with reduced CpG levels, the mutations described above were combined in various configurations. Table 45, below, summarizes combinations of the mutations that were used. In Table 45, a 0 indicates that no mutation was introduced to a given region, a 1, 2, or 3 indicates that a mutation was introduced in that region, as diagrammed in FIG. 110B, and n/a indicates not applicable. Specifically, for region 1, the pseudoknot stem, a 1 indicates that a CG→GC mutation was introduced. For region 2, the scaffold stem, a 1 indicates that a CG→GC mutation was introduced. For region 3, the extended stem bubble, a 1 indicates that the bubble was removed by the deletion of the G and A bases that form the bubble, a 2 indicates that the bubble was resolved by a CG→CT mutation that allows for basepairing between the A and T bases, and a 3 indicates that the extended stem loop was replaced with the extended step loop from guide scaffold 174. For region 4, the extended stem, a 1 indicates that a CG→GC mutation was introduced. For region 5, the extended stem loop, a 1 indicates that the loop was replaced from TTCG to CTTG, a 2 indicates that the loop was replaced along with a basepair adjacent to the loop, from CTTCGG to GGAAAC, and a 3 indicates that an A was inserted between the C and the G.

TABLE 45
Summary of mutations for CpG-reduction
and depletion in guide scaffold 235

| | | | Region 3 | | Region 5 |
|---|---|---|---|---|---|
| | Region 1 | Region 2 | (Extended | Region 4 | (Extended |
| Scaffold | (Pseudoknot | (Scaffold | stem | (Extended | stem |
| ID | stem) | stem) | bubble) | stem) | loop) |
| 320 | 1 | 0 | 0 | 1 | 0 |
| 321 | 1 | 0 | 1 | 1 | 0 |
| 322 | 1 | 0 | 2 | 1 | 0 |
| 323 | 1 | 0 | 3 | n/a | 0 |
| 324 | 1 | 0 | 1 | 1 | 1 |
| 325 | 1 | 0 | 2 | 1 | 1 |
| 326 | 1 | 0 | 3 | n/a | 1 |
| 327 | 1 | 0 | 1 | 1 | 2 |
| 328 | 1 | 0 | 2 | 1 | 2 |
| 329 | 1 | 0 | 3 | n/a | 2 |
| 330 | 1 | 0 | 1 | 1 | 3 |
| 331 | 1 | 0 | 2 | 1 | 3 |
| 332 | 1 | 0 | 3 | n/a | 3 |
| 334 | 1 | 1 | 2 | 1 | 1 |
| 335 | 1 | 1 | 3 | n/a | 1 |
| 336 | 1 | 1 | 1 | 1 | 2 |
| 337 | 1 | 1 | 2 | 1 | 2 |
| 338 | 1 | 1 | 3 | n/a | 2 |
| 339 | 1 | 1 | 1 | 1 | 3 |
| 340 | 1 | 1 | 2 | 1 | 3 |
| 341 | 1 | 1 | 3 | n/a | 3 |
| 235 | 0 | 0 | 0 | 0 | 0 |

Generation of CpG-Depleted AAV Plasmids to Assess CpG-Reduced or Depleted gRNA Scaffolds:

[1242] The CpG-reduced or depleted gRNA scaffolds were tested in the context of AAV vectors that were otherwise CpG-depleted, with the exception of the AAV2 ITRs. Specifically, nucleotide substitutions to replace native CpG motifs in AAV components were designed in silico based on homologous nucleotide sequences from related species for the following elements: the murine U1a snRNA (small nuclear RNA) gene promoter, the bGHpA (bovine growth hormone polyadenylation) sequence, and the human U6 promoter. The coding sequence for CasX 491 was codon-optimized for CpG depletion. All resulting sequences (Tables 44 and 46) were ordered as gene fragments with the appropriate overhangs for cloning and isothermal assembly to replace individually the corresponding elements of the existing base AAV plasmid (construct ID 183). Spacer 7.37 (GGCCGAGAUGUCUCGCUCCG; SEQ ID NO: 2709), which targets the endogenous B2M gene, was used for the experiments discussed in this example. The first time that the experiment was performed (“N=1”), a sample with the non-targeting spacer 0.0 was also included as a control (CGAGACGTAATTACGTCTCG).

[1243] The resulting AAV constructs were generated using standard molecular cloning techniques. Cloned and sequence-validated plasmid constructs were midi-prepped for subsequent nucleofection and AAV vector production. The sequences of the additional components of AAV constructs, with the exception of sequences encoding the gRNAs (Table 44), are listed in Table 46.

TABLE 46
Sequences of AAV elements (5′-3′ in AAV construct)

| Element | DNA SEQ ID NO: |
|---|---|
| AAV2 5′ ITR | 423 |
| CpG-depleted U1a promoter | 2908 |
| CpG-depleted cMycNLS-CasX491- | 2916 |
| cMycNLS | |
| CpG-depleted bGH-polyA sequence | 2917 |
| CpG-depleted U6 promoter | 2910 |
| AAV2 3′ ITR | 424 |

### AAV Production

[1244] Suspension-adapted HEK293T cells, maintained in FreeStyle 293 media, were seeded in 20-30 mL of media at 1.5E6 cells/mL on the day of transfection. Endotoxin-free pAAV plasmids with the transgene flanked by ITR repeats were co-transfected with plasmids supplying the adenoviral helper genes for replication and AAV rep/cap genome using PEI Max (Polysciences) in serum-free Opti-MEM media. Three days later, cultures were centrifuged to separate the supernatant from the cell pellet, and the AAV particles were collected, concentrated, and filtered following standard procedures.

[1245] To determine the viral genome (vg) titer, 1 μL from crude lysate viruses was digested with DNase and ProtK, followed by quantitative PCR. 5 μL of digested virus was used in a 25 μL qPCR reaction composed of IDT primetime master mix and a set of primer and 6′FAM/Zen/IBFQ probe (IDT) designed to amplify a 62 bp-fragment located in the AAV2-ITR. An AAV ITR plasmid was used as reference standards to calculate the titer (vg/mL) of viral samples.

Culturing Human Neural Progenitor Cells (hNPCs) In Vitro:

[1246] Immortalized hNPCs were cultured in hNPC medium (DMEM/F12 with GlutaMax™ 10 mM HEPES, 1×NEAA, 1×B-27 without vitamin A, 1×N2 supplemented growth factors hFGF and EGF, Pen/Strep, and 2-mercaptoethanol). Prior to testing, cells were lifted with TrypLE, gently resuspended to dissociate neurospheres, quenched with media, spun down, and resuspended in fresh media. Cells were counted and directly used for nucleofection or will be seeded at a density of ˜10,000 cells per well on a 96-well plate coated with PLF (poly-DL-ornithine hydrobromide, laminin, and fibronectin) 48 hours prior to AAV transduction.

Plasmid Nucleofection into Human Neural Progenitor Cells (hNPCs):

[1247] AAV plasmids encoding the CasX:gRNA system, with or without CpG depletion of the individual elements of the AAV genome, were nucleofected into hNPCs using the Lonza P3 Primary Cell 96-well Nucleofector Kit. Plasmids were diluted into two concentrations: 50 ng/μL and 25 ng/μL. 5 μL of DNA was mixed with 20 μL of 200,000 hNPCs in the Lonza P3 solution supplemented with 18% V/V P3 supplement. The combined solution was nucleofected using the Lonza 4D Nucleofector System following program EH-100. The nucleofected solution was subsequently quenched with the appropriate culture media and then divided into three wells of a 96-well plate coated with PLF. Seven days post-nucleofection, hNPCs were lifted for B2M protein expression analysis via HLA immunostaining followed by flow cytometry. Subsequently, stacking of individual CpG-depleted elements to create a combined AAV genome with substantial CpG depletion was performed and similarly tested for editing assessment at the B2M locus in vitro.

### Editing Activity Assessment by HLA Immunostaining and Flow Cytometry:

[1248] Seven days after nucleofection, AAV-treated hNPCs were lifted with TrypLE. After cell dissociation, staining buffer (3% fetal bovine serum in dPBS) was used for quenching. The dissociated cells were transferred to a round-bottom 96-well plate, followed by centrifugation and resuspension of cell pellets with staining buffer. After another centrifugation, cell pellets were resuspended in staining buffer containing the antibody (BioLegend) that would detect the B2M-dependent HLA protein expressed on the cell surface. After HLA immunostaining, cells were stained with DAPI to label cell nuclei. HLA+ hNPCs were measured using the Attune™ NxT flow cytometer.

Reprogramming of Induced Pluripotent Stem Cells (iPSCs):

[1249] Fibroblast cells from a patient were obtained from the Coriell Cell Repository. iPSCs were generated from these lines by episomal reprogramming and genetically engineered to ectopically express Neurogenin 2 (Neurog2) to accelerate neuronal differentiation. Three iPSC clones were selected for downstream experiments.

### Neuronal Cell Culture:

[1250] All neuronal cell culture was performed using N2B27-based media. To induce neuronal differentiation, iPSCs were plated in neuronal plating media (N2B27 base media with 1 μg/mL doxycycline, 200 μM L-ascorbic acid, 1 μM dibutyryl cAMP sodium salt, 10 μM CultureOne, 100 ng/ml of BDNF, 100 ng/ml of GDNF). iNs (induced neurons) were dissociated, aliquoted, and frozen for long term storage after three days of differentiation (DIV3). DIV3 iNs were thawed and seeded on a 96-well plate at ˜30,000-50,000 cells per well. iNs were cultured for one week in plating media and thereafter, half-media changes were performed once every week using feeding media (N2B27 base media with 200 μM L-ascorbic acid, 1 μM dibutyryl cAMP sodium salt, 200 ng/ml of BDNF, 200 ng/ml of GDNF).

### AAV Transduction of iNs In Vitro:

[1251] 24 hours prior to transduction, ˜30,000-50,000 iNs per well were seeded on Matrigel-coated 96-well plates. AAVs expressing the CasX:gRNA system, with or without CpG depletion of the individual elements of the AAV genome, were then diluted in neuronal plating media and added to cells. Cells were transduced at two MOIs (1E3 or 3E3 vg/cell). Seven days post-transduction, iNs were replenished using feeding media. Seven days post-transduction, cells were lifted using lysis buffer, 4-well replicates were pooled per experimental condition, and genomic DNA (gDNA) was harvested and prepared for editing analysis at the B2M locus using next generation sequencing (NGS). Subsequently, combining individual CpG-reduced or CpG-depleted elements to create a combined AAV genome with substantial CpG depletion was performed and similarly tested for editing assessment at the B2M locus in vitro. Experiments assessing the effects of incorporating CpG-depleted gRNA scaffold constructs on editing at the B2M locus in vitro will also be similarly conducted.

[1252] In a separate experiment, CpG-depleted guide scaffolds were assessed. Here, iNs were transduced with AAVs expressing the CasX:gRNA system with various versions of the guide scaffold. The first time that the experiment was performed (“N=1”), cells were transduced at an MOI of 4e3 vg/cell (see FIG. 111A). Seven days post-plating, iNs were transduced with virus diluted in fresh feeding media. Eight days post-transduction, cells were lifted using lysis buffer, 4-well replicates were pooled per experimental condition, and gDNA was harvested and prepared for editing analysis at the B2M locus using NGS. The second time that the experiment was performed (“N=2”), cells were transduced at an MOI of 3e3 vg/cell, 1e3 vg/cell, or 3e2 vg/cell (see FIG. 111B, FIG. 111C, and FIG. 111D. Seven days post-plating, induced neurons were transduced with virus diluted in fresh feeding media. Seven days post-transduction, cells were lifted using lysis buffer, 2-well replicates were pooled per experimental condition, and gDNA was harvested and prepared for editing analysis at the B2M locus using NGS. Samples that were not transduced with AAV were included as controls.

### NGS Processing and Analysis:

[1253] Genomic DNA (gDNA) from harvested cells were extracted using the Zymo Quick-DNA™ Miniprep Plus kit following the manufacturer's instructions. Target amplicons were formed by amplifying regions of interest from 200 ng of extracted gDNA with a set of primers specific to the target locus, such as the human B2M gene. These gene-specific primers contained an additional sequence at the 5′ end to introduce an Illumina™ adapter and a 16-nucleotide unique molecule identifier. Amplified DNA products were purified with the Ampure XP DNA cleanup kit. Quality and quantification of the amplicon were assessed using a Fragment Analyzer DNA Analysis kit (Agilent, dsDNA 35-1500 bp). Amplicons were sequenced on the Illumina™ Miseq™ according to the manufacturer's instructions. Raw fastq files from sequencing were quality-controlled and processed using cutadapt v2.1, flash2 v2.2.00, and CRISPResso2 v2.0.29. Each sequence was quantified for containing an insertion or deletion (indel) relative to the reference sequence, in a window around the 3′ end of the spacer (30 bp window centered at −3 bp from 3′ end of spacer). CasX activity was quantified as the total percent of reads that contain insertions, substitutions, and/or deletions anywhere within this window for each sample.

### Results:

### Assessment of Use of CpG-Depleted AAV Vector Elements on Editing in a Cell-Based Assay:

[1254] The findings of an assay assessing the editing activity at the B2M locus in hNPCs nucleofected with CpG-containing (CpG+) or CpG-reduced/depleted (CpG⁻) AAV vectors are illustrated in FIG. 82. Editing activity was measured as the percentage of hNPCs that were edited at the B2M locus, resulting in reduced or lack of B2M expression (B2M⁻) on the cell surface. The results shown in FIG. 82 illustrate that reducing or depleting CpG motifs within the sequences of the U1a promoter (construct ID 178 and 179), Pol III U6 promoter (construct ID 180 and 181), or bGH poly(A) (construct ID 182) did not significantly decrease editing activity compared to the editing level achieved with the original CpG⁺ AAV construct (construct ID 177). Specifically, CpG⁻ U1a, CpG⁻ U6, or CpG⁻ bGH resulted in ˜80%, ˜94%, or ˜83% editing of the editing level attained with the base CpG⁺ AAV construct. However, reducing or depleting CpG motifs within the UbC promoter sequence (construct ID 184, 185, and 186) substantially diminished editing activity compared to the level seen with the base UbC construct (construct ID 183), highlighting context-dependent effects of CpG depletion on AAV editing activity and underscoring the importance of screening individual CpG-depleted AAV elements to retain potent editing.

[1255] The bar plot in FIG. 83 illustrated that use of the U1a promoter (construct ID 177) resulted in higher editing at the B2M locus when compared to the editing level after use of the UbC promoter (construct ID 183) at both MOIs. This improvement in editing was recapitulated when comparing the use of their CpG-reduced and CpG-depleted counterparts at both MOIs (compare construct ID 178-179 to construct ID 184-186; FIG. 83). Furthermore, depleting CpGs in either U1a or UbC resulted in reduced editing when compared to the editing observed from using their wild-type (WT) or CpG-reduced counterparts (FIG. 83). Interestingly, depleting CpGs in the U1a promoter nevertheless resulted in relatively higher editing compared to the editing level achieved when depleting CpGs in the UbC promoter (FIG. 83).

[1256] In addition to evaluating the effects of depleting CpGs in different protein promoters (e.g., U1a compared to UbC) on editing mediated by the CasX:gRNA system delivered by AAVs, the effects of depleting CpGs in other elements on editing were analyzed at two MOIs (FIGS. 84A-84B). Furthermore, individual CpG⁻ elements were combined to generate an AAV genome with substantial CpG depletion, and the consequential effects on editing at the B2M locus were assessed (FIGS. 84A-84B).

[1257] FIGS. 84A-84B each show bar plots that illustrate the quantification of percent editing at the B2M locus as detected by NGS seven days post-transduction of AAVs into human iNs at an MOI of 3E3 (FIG. 84A) or 1E3 (FIG. 84B). Various CpG-reduced or CpG-depleted AAV elements were tested to assess the effects of their use on editing efficiency at the B2M locus as follows: 177 (no CpG depletion); 178 (U1A promoter with reduced CpG); 179: (U1A promoter with CpG depleted); 180 (U6 promoter with reduced CpG); 181(U6 promoter with CpG depleted); 182 (bGH poly(A) with CpG depleted); 206 (U1A promoter with reduced CpG, CasX491 with CpG depleted, bGH with CpG depleted, and U6 promoter with CpG depleted); 205 (U1A promoter with CpG depleted, CasX491 with CpG depleted, bGH with CpG depleted, and U6 promoter with CpG depleted). ITRs are wild-type sequence.

[1258] Several key conclusions were determined from these results illustrated in FIGS. 84A-84B: 1) use of CpG-depleted U1a promoter resulted in a drastic decrease in editing compared to the editing from using the WT or CpG-reduced U1a, supporting findings observed in FIG. 83; 2) depleting CpGs in either the bGH-polyA or U6 RNA promoter resulted in similar editing levels as that achieved by their WT counterpart; and 3) combining CpG-depleted or CpG-reduced elements to build a combined AAV genome with substantial CpG reduction could still retain editing activity (FIGS. 84A-84B).

[1259] Additionally, results from experiments aimed to assess the effects of incorporating CpG-depleted gRNA scaffold constructs into a combined AAV genome with substantial CpG depletion on editing at the B2M locus may reveal that varying levels of editing potency can be achieved when delivered and packaged via AAVs.

[1260] These experiments demonstrated that using AAV elements with different levels of CpG depletion can result in varying levels of editing mediated by the CasX:gRNA system when packaged and delivered in vitro via AAVs. The data also revealed that depleting CpGs in certain elements could result in similar levels of editing as that achieved when using their WT counterpart. Incorporating CpG-reduced or CpG-depleted elements further expands the inventory of diverse sequences that could be used to build an AAV genome, potentially reducing the risk of recombination during AAV packaging and production.

### Assessment of Use of CpG-Depleted Guide Scaffolds on Editing in a Cell-Based Assay:

[1261] Mutations were introduced into the guide scaffold 235 to reduce the CpG content of the DNA sequence coding the guide scaffold. Surprisingly, compared to scaffold 235, all CpG-reduced and CpG-depleted scaffold variants produced higher levels of editing in induced neurons. This was the case with two independent repeats of the experiment (with the results from the first repeat of the experiment shown in FIG. 111A, and the results of the second repeat of the experiment shown in FIGS. 111B-111D), and across multiple MOIs (FIGS. 111B-111D). The enhanced level of editing was surprising because the goal of reducing CpG content was to simply preserve editing activity while reducing immunogenicity. Instead, the mutations enhanced editing activity, rather than merely preserving it.

[1262] Notably, scaffold 320 showed a significant increase in potency over scaffold 235. Scaffold 320 includes mutations to only two regions of the scaffold: in the pseudoknot stem and the extended stem (regions 1 and 4). Further, some combinations of mutations produced worse editing than scaffold 320. However, even the CpG-reduced scaffolds that performed worse than scaffold 320, such as scaffolds 331 and 334, performed similarly to or better than scaffold 235.

[1263] Based on these results, without wishing to be bound by theory, it is believed that the boost in potency seen in many of the CpG-reduced and CpG-depleted scaffolds is likely caused by one of the mutations present in all CpG-reduced scaffolds (i.e., region 1 and/or 4). Since the mutation to region 4 is not present in the scaffolds with the extended stem loop replacement (i.e., the third mutation to region 3) and these scaffolds show a similar improvement in potency over 235 as 320 did, it is believed that the beneficial effect is likely caused by the mutation in region 1 (pseudoknot stem), which is present in all tested scaffolds. Further experiments will be performed to test the effect of the individual mutations in the pseudoknot stem (region 1) and the extended stem (region 4) separately.

[1264] Further, the N=1 data as presented in FIG. 111A indicate that all the new scaffolds carrying the mutation in region 2 (scaffold stem) edited at a slightly lower level than their respective counterparts without this mutation. This suggests that mutating this position in the scaffold stem may have a small deleterious effect on editing potency. This will be examined in additional experiments.

[1265] The results described here demonstrate that introducing mutations that reduced the CpG content of the DNA encoding the guide RNA scaffold resulted in improvements in gene editing relative to guide scaffold 235.

### Example 24: CpG-Depleted AAVs Induce Less TLR9-Mediated Immune Response In Vitro

[1266] In the preceding example, CpG-reduced and CpG-depleted AAVs were shown to achieve editing at the human B2M locus. Here, experiments will be performed to assess the effects of CpG reduction or CpG depletion on the activation of TLR9-mediated immune response in vitro. Individual elements of the AAV genome and their respective CpG-reduced or CpG-depleted versions will be subjected to in vitro assessment of immunogenicity to identify the optimal CpG-depleted sequences that reduce undesired TLR9 activation and yield potent editing (as demonstrated in Example 23), before being combined to generate an AAV genome with drastically reduced CpG presence for further evaluation.

### Materials and Methods

[1267] AAV plasmid cloning, production of AAV vectors, and titering will be performed as described in Example 2. Human TLR9 reporter HEK293 cells (HEK-Bluem hTLR9) will be used for in vitro immunogenicity assessment post-transduction with CpG-containing (CpG⁺) or CpG-depleted (CpG⁻) AAVs.

[1268] These HEK-Bluem hTLR9 cells overexpress the human TLR9 gene, as well as a SEAP (secreted embryonic alkaline phosphatase) reporter gene under the control of an NF-κB inducible promoter. SEAP levels in the cell culture medium supernatant, which can be quantified using colorimetric assays, report TLR9 activation.

[1269] For this experiment, 5,000 HEK-Bluem hTLR9 cells will be plated in each well of a 96-well plate in DMEM medium with 10% FBS and Pen/Strep. The next day, seeded cells will be transduced with CpG⁺ or CpG⁻ AAVs expressing the CasX:gRNA system. All viral infection conditions will be performed at least in duplicate, with normalized number of viral genomes (vg) among experimental vectors, in a series of three-fold serial dilution of MOI starting with the effective MOI of 1E6 vg/cell. Levels of secreted SEAP in the cell culture medium supernatant will be assessed using the HEK-Blue™ Detection kit at 1, 2, 3, and 4 days post-transduction following the manufacturer's instructions.

[1270] The experiments using HEK-Bluem hTLR9 cells to assess TLR9-modulated immune response are expected to show reduced levels of secreted SEAP from cells treated with CpG-AAVs in comparison to levels from cells treated with unmodified CpG⁺ AAVs. Reduced SEAP levels would indicate decreased TLR9-mediated immune activation.

### Example 25: In Vivo Administration of AAV Vectors with or without CpG-Depleted Genomes to Assess the Effects on Inflammatory Cytokine Production and CasX-Mediated Editing

[1271] Experiments will be performed to assess the effects of administering AAV vectors with or without CpG-depleted genomes in vivo. Briefly, AAV particles expressing the CasX:gRNA system (with or without CpG depletion) will be administered into C57BL/6J mice. In these experiments, the combined AAV genome with substantial CpG depletion will be used for assessment. After AAV administration, mice will be bled at various time points to collect blood samples. Production of inflammatory cytokines such as IL-10, IL-6, IL-12, and TNF-α will be measured using ELISA and an assay that will assess transgene-specific T cell populations generated against the SIINFEKL peptide.

### Materials and Methods

### Generation of CpG-Depleted AAV Plasmids:

[1272] To assess the generation of transgene-specific T cells, a sequence encoding a SIINFEKL peptide will be cloned into an AAV transgene plasmid on the C- and N-terminus of the encoded CasX protein, along with a gRNA with a ROSA26-targeting spacer. The SIINFEKL peptide is an ovalbumin-derived peptide that is well-characterized and has widely available reagents to probe for T cells specific for this peptide epitope.

[1273] Production of AAV vectors and determination of viral genome titer will be performed as described earlier in Example 1.

### Measurement of Inflammatory Cytokines to Assess Humoral Immune Activation:

[1274] ˜1E12 vg AAVs will be injected intravenously or intraperitoneally into C57BL/6J mice. Blood will be drawn daily from the tail vein or saphenous vein for seven days after AAV injection. Collected blood serum will be assessed for the levels of inflammatory cytokines, such as IL-10, IL-6, IL-12, and TNF-α using commercially available ELISA kits according to the manufacturer's recommendations for murine blood samples (Abcam). Briefly, 50 μL of standard, control buffer, and sample will be loaded to the wells of an ELISA plate, pre-coated with a specific antibody to IL-10, IL-6, IL-12, or TNF-α, incubated at room temperature (RT) for two hours, washed, and incubated with horseradish peroxidase enzyme (HRP) for two hours at RT, followed by additional washes. Wells will be treated with TMB ELISA substrate and incubated for 30 minutes at RT in the dark, followed by quenching with H₂SO₄. Absorbance will be measured at 450 nm using a TECAN spectrophotometer with wavelength correction at 570 nm.

### Assessment of Transgene-Specific T Cell Populations:

[1275] Ten days after intravenous injection with AAVs, the spleen will be collected from mice, and T cells will be isolated using the EasySep™ Mouse T Cell Isolation kit. Isolated T cells will be incubated with the following: FITC mouse anti-human CD4 antibody (BD Biosciences), APC mouse anti-human CD8 antibody (BD Biosciences), and BV421 ovalbumin SIINFEKL MHC tetramer (Tetramer Shop). The percentage of CD4+ and CD8+ T cells specific to the SIINFEKL MHC tetramer will be quantified using flow cytometry. FITC, APC, and BV421 will be excited by the 488 nm, 561 nm, and 405 nm lasers and signal will be quantified using suitable filter sets.

### Quantification of AAV-Mediated Genome Editing at the ROSA26 Locus:

[1276] To demonstrate that CpG⁻ AAVs exhibit enhanced CasX editing activity relative to CpG⁺ AAVs in vivo, AAV particles containing CasX protein 491 with gRNA targeting the ROSA26 locus will be administered intravenously via the facial vein of C57BL/6J mice. Four weeks post-injection, mice will be euthanized, and the liver and/or muscle tissue will be harvested for gDNA extraction using the Zymo Quick DNA/RNA™ miniprep Kit following the manufacturer's instructions. Target amplicons will be amplified from extracted gDNA with a set of primers targeting the mouse ROSA26 locus of interest and processed for NGS as described earlier in Example 23.

[1277] In vivo experiments measuring serum inflammatory cytokine levels are expected to show that CpG-depleted AAVs would significantly dampen production of inflammatory cytokines, such as IL-10, IL-6, IL-12, and TNF-α, thereby reducing immunogenicity and toxicity. In addition, CpG-depleted AAVs are likely to cause less TLR9 activation leading to reduced expansion of T cells against the SIINFEKL peptide fused to CasX. Therefore, injections with CpG-depleted AAVs are expected to yield decreased levels of SIINFEKL-specific CD4+ and CD8+ T cells compared to levels from AAV constructs containing CpG elements.

[1278] Since CpG-depleted AAVs are likely to cause less humoral immune activation and non-specific inflammation, as well as less T-cell mediated immunity, titers of CasX-reactive antibodies are also expected to be reduced (i.e., lower ELISA signal quantifying CasX antibodies are anticipated).

[1279] Finally, editing capabilities of CpG-depleted AAVs will be assessed by harvesting muscle and/or liver tissue for genomic DNA extraction and subjected to NGS to determine editing levels at the ROSA26 locus. Enhanced CasX editing activity at the ROSA26 locus is anticipated with CpG-depleted AAVs, given their expected likelihood to elicit less humoral immune response in vivo.

### Example 26: Demonstration that Combining shRNA Transcriptional Units Results in Increased Silencing of CRISPR Expression in Producing Cells

[1280] Experiments were performed to demonstrate that multiple shRNA transcriptional units can be combined in an AAV construct to increase shRNA production, which results in stronger silencing of CasX expression in the AAV-producing cells to hamper CasX-mediated cleavage of the AAV genome during production. FIG. 85 illustrates a general schematic of variations in which the shRNA transcriptional unit can be arranged and combined (or “stacked”) when supplied on the same plasmid as the AAV transgene.

### Materials and Methods

[1281] ShRNA sequences were cloned using similar methods as described in Example 17. For stacked shRNA backbones containing Pol III promoters (hU6, 7SK, H1, mU6; see Table 25 for sequences), transgene backbones were digested with the AatII restriction enzyme, and Gibson Assembly was used to clone permutations of shRNA transcriptional units into the bacterial backbone outside the ITRs. This resulted in a plasmid in which the shRNA sequence, or sequences, were included on the same plasmid as the AAV transgene sequence, but were outside of the region between the ITRs that was packaged into the AAV vectors by the packaging cells.

[1282] For the constructs used in FIG. 86 and FIG. 87, the AAV transgene encoded for CasX variant 491 that was driven by the UbC promoter, with gRNA scaffold 174; the CasX nuclease construct was flanked on the 5′ end with a tdTomato proto-spacer preceded by an ATCN PAM. For FIG. 88 and FIG. 89, the AAV transgene encoded for CasX variant 491, with gRNA scaffold 174; the CasX nuclease construct was flanked on the 5′ end with a ROSA26 proto-spacer (AGAAGATGGGCGGGAGTCTT (SEQ ID NO: 2920)) preceded by a TTCN PAM.

[1283] AAV vector production and titering were performed as described in Example 12. Cell crude lysates were obtained as described in Example 17. Sequences of the various AAV elements are listed in Tables 63-65.

[1284] Western blotting was performed as described in Example 17. Western blot quantification was performed using similar methods described in Example 17. The expression of CasX was normalized to total protein to account for loading differences. For FIG. 86, to determine the fold knockdown of CasX, the normalized expression of CasX obtained for construct ID 32 (without an shRNA transcriptional unit) was divided by the normalized expression of CasX obtained for construct ID 90-103 and 118. To determine fold knockdown of CasX shown in FIG. 88, the normalized expression of CasX obtained for construct ID 139 (scrambled shRNA) was divided by the normalized expression of CasX obtained for construct ID 104-114, 116, and 138.

Assessment of ssAAV Genome by NGS:

[1285] To assess the presence of edits in the packaged ssAAV genome, ssDNA was isolated from crude lysate or purified viruses by DNase I digest followed by Proteinase K incubation. 1-5 μL of ssDNA was used for amplification of AAV transgene region flanking the self-inactivating on-target spacer. The rest of the protocol was conducted per Example 12.

### Results:

[1286] The results in FIG. 86 illustrate that stacking an shRNA8 having a miR-endo scaffold driven either by the 7SK or H1 promoter with a U6-driven shRNA8 having a miR-Scribe scaffold (construct ID 93 or 94 respectively) resulted in dramatically improved knockdown of CasX expression over the knockdown achieved with construct ID 90, which contained a single U6-driven shRNA8 transcriptional unit harboring a miR-Scribe scaffold. Specifically, construct ID 93 and 94 were able to attain a ˜55-fold and ˜117-fold knockdown of CasX expression respectively, while construct ID 90 yielded ˜8-fold knockdown (FIG. 86). Furthermore, stacking a third shRNA transcriptional unit, i.e., H1-miR-endo-shRNA8 (construct ID 95) or H1-miR-E-shRNA8 (construct ID 96) also resulted in CasX knockdown; however, the fold knockdown effects were less substantial compared to that achieved by construct ID 93 or 94 (FIG. 86). Furthermore, use of a mouse U6 (mU6) promoter to drive shRNA8 expression yielded relatively improved CasX knockdown over that achieved when using an EF1α promoter but comparatively less knockdown seen with a human U6 promoter (compare construct ID 97 with 118 and 90 respectively; FIG. 86). The results further show that combining additional shRNA units with the mU6-driven unit does not yield improved knockdowns of CasX (FIG. 86).

[1287] NGS analysis of the ssDNA packaged in the siAAV with various iterations of shRNA8 supplementation illustrated and discussed in FIG. 87 revealed that these improvements to the shRNA silencing backbones were all, including the constructs utilizing the mU6 promoter, able to achieve >92% of intact AAV genomes, which was higher than the level achieved (˜84%) with only using the EF1α strategy (construct ID 118).

[1288] To differentiate further the functional performance in activity amongst the various shRNA silencing backbone iterations, siAAVs were produced to package an AAV genome containing an alternative TTCN STALL site; previously, the TTCN PAM was shown to demonstrate a relatively higher affinity with CasX compared to that with an ATCN PAM. Findings observed with CasX knockdown in FIG. 86 were recapitulated in FIG. 88: combining an H1-driven shRNA8 with a miR-endo scaffold unit with a hU6-miR-Scribe-shRNA8 unit (construct ID 107) resulted in the highest level of CasX knockdown among the shRNA iterations tested. Furthermore, use of a single hU6-driven shRNA transcriptional unit (construct ID 138) continued to yield a substantial fold knockdown of CasX, especially in comparison to using a mU6 promoter (construct ID 110) or various iterations of a stacked shRNA backbone (construct ID 104-109) to drive shRNA expression (FIG. 88).

[1289] The bar graph in FIG. 89 illustrates the quantification of AAV genome intactness as detected by NGS for the same set of constructs assessed in FIG. 88. The results show that inclusion of additional shRNA transcriptional units (construct ID 104-114, and 116) produced more intact AAV genomes compared to the level of intactness achieved by the single hU6-miR-Scribe-shRNA unit (construct ID 138). Specifically, of the various stacked iterations, use of construct ID 114, which contained the combination of mU6-miR-Scribe-shRNA unit with an H1-miR-endo-shRNA unit, produced the highest level of intact AAV genomes at ˜95% out of all the constructs assessed. Furthermore, the data suggest that use of the mU6 promoter is at least as effective in producing intact AAV genomes as use of the hU6 promoter for driving shRNA expression (FIG. 89).

[1290] The results from these experiments demonstrate that stacking of shRNA transcriptional units using different combinations of miR-scaffolds and Pol III promoters can result in increased expression of shRNA to silence CasX expression in the producing cells. Additionally, the data demonstrate that various elements of the siAAV vector can be further engineered to achieve greater silencing of CasX-mediated cleavage of the AAV genome during production while simultaneously improving CasX editing at the target locus.

### Example 27: Demonstration that shRNA, or shRNAs, can be Supplied on the pRepCap Production Plasmid to Silence CRISPR Protein Expression in Producing Cells

[1291] Experiments were performed to demonstrate that an shRNA, or multiple shRNAs, can be supplied on other plasmids (in this example, the pRepCap plasmid) used for AAV production to reduce CasX protein expression in the producing cell lines. FIG. 72 shows various possible vector arrangements for supplying an shRNA or multiple shRNAs, during packaging, including on the pRepCap or pHelper plasmid.

### Materials and Methods

[1292] shRNA sequences were cloned using similar methods as described in Example 17. For pRepCap plasmids containing stacked shRNA silencing elements, the pRepCap plasmid was digested with the NdeI restriction enzyme, and Gibson Assembly was used to clone permutations of shRNA transcriptional units into the bacterial backbone of the pRepCap plasmid. Sequences of the various elements of the tested vectors are listed in Tables 65 and 66.

[1293] AAV vectors were produced, and their titer was determined using similar methods described in Example 12, with the exception of using a set of primers specific for the bGH poly(A) signal sequence. Assessment of ssAAV genome by NGS was performed as described in Example 18.

### Results:

[1294] The bar chart in FIG. 90 shows that supplying shRNA or shRNAs to CasX on the pRepCap plasmid resulted in the reduction of CasX-mediated cleavage of the AAV transgene in the packaging cell, and therefore, produced higher levels of intact AAV genomes.

[1295] Furthermore, a pRepCap plasmid termed siAAV construct 167 was generated with two shRNA transcriptional units (mU6-shRNA8a and H1-shRNA8b). This pRepCap construct was used to produce AAVs with no STALL site and siAAVs with an ATC, CTC, or GTC STALL site. Assessment of the ssAAV genome by NGS was performed as described in Example 18. As shown in FIG. 114, construct 167 produced high levels of intact siAAVs, supporting the findings in FIG. 90 that supplying shRNAs on the pRepCap plasmid enabled the production of intact AAV genomes. As anticipated, use of construct 167 also resulted in high levels of intact XAAVs.

[1296] The results from these experiments demonstrate that expressing an shRNA or multiple shRNAs from production plasmids such as pRepCap is a viable alternative approach to supplying them on the same plasmid as the AAV transgene to silence CasX-mediated premature cleavage of the AAV genome during production.

### Example 28: Guide RNA Guide Scaffold Platform Evolution

[1297] Experiments were conducted to identify guide RNA guide scaffold variants that exhibit improved activity for double-stranded DNA (dsDNA) cleavage. In order to accomplish this, a large-scale library of scaffold variants was designed and tested in a pooled manner for functional knockout of a reporter gene in human cells. Scaffold variants leading to improved knockout were determined by sequencing the functional elements within the pool and subsequent computational analysis.

### Materials and Methods

### Library Design

### Assessment of RNA Secondary Structure Stability

[1298] RNAfold (v2.4.14) (Lorenz R, et al. ViennaRNA Package 2.0. Algorithms Mol Biol.6:26 (2011)) was used to predict the secondary structure stability of RNA sequences, similar to what was done in Jarmoskaite I., et al. “A quantitative and predictive model for RNA binding by human pumilio proteins”, Mol Cell. 74(5):966 (2019). To assess the ΔΔG_BC value, the ensemble free energy (ΔG) of the unconstrained ensemble was calculated, then the ensemble free energy (ΔG) of the constrained ensemble was calculated. The ΔΔG_BC is the difference between the constrained and unconstrained ΔG values. A constraint string was used that reflects the base-pairing of the pseudoknot stem, scaffold stem, and extended stem, and requires the bases of the triplex to be unpaired.

### Calculation of Pseudoknot Stem Secondary Structure Stability

[1299] Pseudoknot structure stability was calculated for the entire stem-loop spanning positions 3-33, using the triplex loop sequence from guide scaffold 175. Further, a constraint string was generated that enforced pairing of the pseudoknot bases and unpairing of the bases in the triplex loop. Changes in stability could thus only be due to the differences in the sequence of the pseudoknot stem. For example, the pseudoknot sequence AAAACG_CGUUUU (SEQ ID NO: 2921) was turned into a stem-loop sequence by inserting the triplex loop sequence CUUUAUCUCAUUACUUUGA (SEQ ID NO: 2922), so that the final sequence would be AAAACGCUUUAUCUCAUUACUUUGACGUUUU (SEQ ID NO: 2923), and the constraint string was: ‘((((((xxxxxxxxxxxxxxxxxxx))))))’ (where x=n).

### Molecular Biology

### Molecular Biology of Library Construction

[1300] The designed library of guide RNA scaffold variants was synthesized and obtained from Twist Biosciences, then amplified by PCR with primers specific to the library. These primers amplify additional sequence at the 5′ and 3′ ends of the library to introduce sequence recognition sites for the restriction enzyme SapI. PCR was performed with Q5 DNA Polymerase (New England Biolabs®) and performed according to the manufacturer's instructions. Amplified DNA product was purified with DNA Clean and Concentrator@ kit (Zymo Research). This PCR amplicon, as well as plasmid pKB4, was then digested with the restriction enzyme SapI (New England Biolabs®) and both were independently gel purified by agarose gel electrophoresis followed by gel extraction (Zymo) according to the manufacturer's instructions. Libraries were then ligated using T4 DNA Ligase (New England Biolabs®), purified with DNA Clean and Concentrator® kit (Zymo), and transformed into MegaX DH10B T1R Electrocomp Cells (Thermo Fisher Scientific™) all according to the manufacturer's instructions. Transformed libraries were recovered for one hour in SOC media, then grown overnight at 37° C. with shaking in 5 mL of 2xyt media. Plasmid DNA was then miniprepped from the cultures (QIAGEN®). Plasmid DNA was then further cloned by digestion with restriction enzyme Esp3I (New England Biolabs®), followed by ligation with annealed oligonucleotides possessing complementary single stranded DNA overhangs and the desired spacer sequence for targeting GFP. The oligonucleotides possessed 5′ phosphorylation modifications, and were annealed by heating to 95° C. for 1 min, followed by reduction of the temperature by two degrees per minutes until a final temperature of 25° C. was reached. Ligation was performed as a Golden Gate Assembly Reaction. The reaction was cycled 25 times between 37° C. for 3 minutes and 16° C. for 5 minutes. As above, the library was purified, transformed, grown overnight, and miniprepped. The resulting library of plasmids was then used for the production of lentivirus.

### Library Screening

### LV Production

[1301] Lentiviral particles were generated by transfecting LentiX HEK293T cells, seeded 24h prior, at a confluency of 70-90%. Plasmids containing the pooled library were introduced to a second generation lentiviral system containing the packaging and VSV-G envelope plasmids. Viruses were harvested at 36-48h post-transfection. Viral supernatant was filtered using 0.45 μm PES membrane filters and diluted in cell culture media when appropriate, prior to addition to target cells.

[1302] 72 hours post-filtration, aliquots of lentiviral supernatant were titered by TaqMan™ qPCR. Viral genomic RNA was isolated using a phenol-chloroform extraction (TRIzol™) followed by alcohol precipitation. Quality and quantity of extraction was evaluated by nano-drop reading. Any residual plasmid DNA was then digested with DNase I just prior to cDNA production by Thermo Fisher™ SuperScript IV Reverse Transcriptase. Viral cDNA was subject to serial dilutions through 1:1000 and combined with WPTRE based primers and TaqMan™ Master Mix prior to qPCR by Bio-Rad CFX96. All sample dilutions are added in duplicate and averaged prior to titer calculations against a known, plasmid-based standard curve. Water is always measured as a negative control.

LV Screening (Transduction, Maintenance, Gating, Sorting, gDNA Isolation)

[1303] Target reporter cells are passed 24-48h prior to transduction to ensure cellular division occurs. At the point of transduction, the cells were trypsinized, counted, and diluted to appropriate density. Cells were resuspended with no treatment, library- or control-containing neat lentiviral supernatant at a low MOI (0.1-5, by viral genome) to minimize dual lentiviral integrations. The lentiviral-cellular mixtures were seeded at 40-60% confluency prior to incubation at 37° C., 5% CO2. Cells were selected for successful transduction 48h post-transduction with puromycin at 1-3 μg/ml for 4-6 days followed by recovery in HEK or Fb medium.

[1304] Post-selection, cells were suspended in 4′6-diamidino-2-phenylindole (DAPI) and phosphate-buffered saline (PBS). Cells were then filtered and sorted on the Sony MA900. Cells were sorted for knockdown of the fluorescent reporter, in addition to gating for single, live cells via standard methods. Sorted cells from the experiment were lysed, and the genome was extracted using a Zymo Quick-DNA™ Miniprep Plus following the manufacturer's protocol.

### Processing for Next Generation Sequencing (NGS)

[1305] Genomic DNA was amplified via PCR with primers specific to the guide RNA-encoding DNA, to form a target amplicon. These primers contain additional sequence at the 5′ ends to introduce Illumina™ read and 2 sequences. Amplified DNA product is purified with Ampure XP DNA cleanup kit. A second PCR step was done with indexing adapters to allow multiplexing on the Illumina™ platform, followed by purification, and quality and quantification assessment. Amplicons were sequenced on the Illumina™ Miseq™ according to the manufacturer's instructions.

### NGS Analysis (Sample Processing and Data Analysis)

[1306] Reads were trimmed for adapter sequences with cutadapt (version 2.1), and the guide sequence (comprising the scaffold sequence and spacer sequence) was extracted for each read (also using cutadapt v 2.1 linked adapters to extract the sequence between the upstream and downstream amplicon sequence). Unique guide RNA sequences were counted, and then each scaffold sequence was compared to the list of designed sequences and to the sequence of guide scaffolds 174 (SEQ ID NO: 2238) and 175 (SEQ ID NO: 2239) to determine the identity of each.

[1307] Read counts for each unique guide RNA sequence were normalized for sequencing depth using mean normalization. Enrichment was calculated for each sequence by dividing the normalized read count in each GFP-sample by the normalized read count in the associated naive sample. For both selections (R2 and R4), the GFP- and naive populations were processed for NGS on three separate days, forming an enrichment value for each scaffold in triplicate. An overall enrichment score per scaffold was calculated after summing the read counts for the naive and GFP-samples across triplicates.

[1308] Two enrichment scores from different selections were combined by a weighted average of the individual log 2 enrichment scores, weighted by their relative representations within the naive population.

[1309] Error on the log 2 enrichment scores was estimated calculating a 95% confidence interval on the average enrichment score across triplicate samples. These errors are propagated when combining the enrichment values for the two separate selections.

### Results and Discussion

### Library Design, Ordering, and Cloning

[1310] A library of guide RNA variants was designed to both test variation to the RNA scaffold in an unbiased manner and in a targeted manner that focused on key modules within the RNA scaffold.

[1311] In the unbiased portion of the library, all single nucleotide substitutions, insertions, and deletions were designed to each residue of guide scaffolds 174 (SEQ ID NO: 2238) and 175 (SEQ ID NO: 2239) (˜2800 individual sequences). Double mutants were designed to specifically focus on areas that could possibly be interacting; thus if in the CryoEM structure (PDBid: 6NY2), two residues were involved in a canonical or non-canonical base pairing interaction, or two residues were predicted to pair in the lowest-energy structure predicted by RNAfold (v2.4.14), then the corresponding residues in guide scaffolds 174 and 174 were mutated (including all possible substitutions, insertions, and deletions of both residues). Adjacent residues to these ‘interacting’ residues were also mutated; however for these only substitutions of each of the two residues were included. In the final library, ˜27K sequences were designed with two mutations relative to guide scaffolds 174 or 175.

[1312] In the portion of the library devoted to specific mutagenesis of key regions of the RNA scaffold, modifications were designed to: the pseudoknot region, the triplex region, the scaffold bubble, and the extended stem (see FIG. 92 for region identification). In each of these targeted sections of the library, the entire domain was mutagenized in a hypothesis-driven manner (FIG. 93). As an example, for the triplex region, each of the base triplets that comprise the triplex was mutagenized to a different triplex-forming motif (see FIG. 94). This type of mutagenesis is distinct from that employed in the scaffold stem bubble, in which all possible substitutions of the bases surrounding the bubble were mutagenized (i.e., with up to 5 mutations relative to guide sequences 174 or 175). In contrast again, the 5 base-pairs comprising the pseudoknot stem were completely replaced with alternate Watson-Crick pairing sequence (up to 10 distinct bases mutagenized).

[1313] A final targeted section of the library was meant to optimize for sequences that were more likely to form secondary structures amenable to binding of the protein. In short, the secondary structure stability of a sequence was predicted under two conditions: 1) in the absence of any constraints, 2) constrained such that the key secondary structure elements such as pseudoknot stem, scaffold stem, and extended stem are formed (see Materials and Methods). Our hypothesis was that the difference in stability between these two conditions (called here ΔΔG_BC) would be minimal for sequences that are more amenable to protein binding, and thus we should search for sequences in which this difference is minimal).

[1314] The designed library was ordered from Twist (˜40K distinct sequences), and synthesized to include golden gate sites for cloning into a lentiviral plasmid backbone that also expressed the protein STX119 (see Materials and Methods). A spacer sequence targeting the GFP gene was cloned into the library vector, effectively creating single-guide RNAs from each RNA scaffold variant to target the GFP gene. The representation of the designed library variants was assessed with next generation sequencing (see Materials and Methods).

### Library Screening and Assessment

[1315] The plasmid library containing the guide RNA variants and a single CasX protein (version 119) was made into lentiviral particles (see Materials and Methods); particles were titered based on copy number of viral genomes using a qPCR assay. A cell line stably expressing GFP was transduced with the lentiviral particle library at a low multiplicity of infection (MOI) to enforce that each cell integrated at most one library member. The cell pool was selected to retain only cells that had a genomic integration. Finally, the cell population was sorted for GFP expression, and a population of GFP negative cells was obtained. These GFP negative cells contained the library members that effectively targeted the CasX RNP to the GFP protein, causing an indel and subsequent loss of function.

[1316] Genomic DNA from the unsorted cell population (“naive”) and the GFP negative population was processed to isolate the sequence of the guide RNA library members in each cell. To determine the representation of guide RNAs in the naive and GFP negative populations, next generation sequencing was performed. Enrichment scores were calculated for each library member by dividing the library member's representation in the GFP-population by its representation in the naive population: A high enrichment score indicates a library member that is much more frequent in the active, GFP negative population than in the starting pool, and thus is an active variant capable of effectively generating an indel within the GFP gene (enrichment value >1, log 2 enrichment >0). A low enrichment score indicates a library member that is depleted in the active GFP-population compared to the naive, and thus ineffective at forming an indel (enrichment value <1, log₂ enrichment <0). As a final statistic for comparison, the relative enrichment value was calculated as the enrichment of a library member (in the GFP negative vs naive population), divided by the enrichment of the reference scaffold sequence (in the GFP negative vs naive population). (In log space, these values are simply subtracted.) The enrichment values of the reference scaffold sequences are shown in FIG. 95).

[1317] The screen was performed multiple times, with independent production of lentiviral particles, transduction of cells, selection and sorting to obtain naive and GFP negative populations, and sequencing to learn enrichment values of each library member. These screens were called R2 and R4, and largely reproduce the enrichment values obtained for single nucleotide variants on guide scaffolds 174 and 175 (data not shown). The screen was able to identify many possible combinations of mutations that were enriched in the functional GFP-population, and thus can lead to functional RNPs. In contrast, no guides that contained non-targeting spacers were enriched, confirming that enrichment is a selective cutoff (data not shown). The full set of mutations on guide scaffolds 174 and 175 that were enriched are given in Tables 47 and 48, respectively. These lists reveal the sequence diversity still capable of achieving targeted, functional RNPs.

### Single Nucleotide Mutations Indicate Mutable Regions of the Scaffold:

[1318] To determine scaffold mutations that lead to similar or improved activity relative to guide scaffolds 174 and 175, enrichment values of single nucleotide substitutions, insertions, or deletions were plotted as heat maps (FIG. 97). Generally, single nucleotide changes on guide scaffold 174 were more tolerated than guide scaffold 175, perhaps reflecting higher activity of guide scaffold 174 in this context and thus a higher tolerance to mutations that dampen activity (FIG. 95 and FIG. 98). Single nucleotide mutations on 175 that were favorable were also favorable in the context of guide scaffold 174 in the vast majority of cases (FIG. 98), and thus the values for mutations on guide scaffold 175 were taken to be a more stringent readout of mutation effects. Key mutable areas were revealed by this analysis, as described in the following paragraphs:

[1319] The most notable feature was the extended stem, which showed similar enrichment values as the reference sequences for scaffolds 174 or 175, suggesting that the scaffold could tolerate changes in this region, similar to what has been seen in the past and would be predicted by structural analysis of the CasX RNP in which the extended stem is seen to have little contact with the protein.

[1320] The triplex loop was another area that showed high enrichment relative to the reference scaffold, especially when made in guide scaffold 175 (e.g., especially mutations to C15 or C17). Notably, the C17 position in 175 is already mutated to a G in scaffold 174, which is one of the two highly enriched mutations at this position to scaffold 175.

[1321] Changes to either member of the predicted pair in the pseudoknot stem between G7 and A29 were both highly enriched relative to the reference, especially in guide scaffold 175. This pair is a noncanonical G:A pairing in both guide scaffolds 174 and 175. The most strongly enriched mutation at these positions were in guide scaffold 175, converting A29 to a C or a T; the first of which would form a canonical Watson-Crick pairing (G7:C29), and the second of which would form a GU wobble pair (G7:U29), both of which may be expected to increase stability of the helix relative to the G:A pair. Converting the G7 to a T was also highly enriched, which would form a canonical pair (U7:A29) at this position. Clearly, these positions favor being more stably paired. In general, the 5′ end was mutable, with few changes leading to de-enrichment.

[1322] Finally, the insertion of a C at position 54 in guide scaffold 175 was highly enriched, whereas deletion of either the A or the inserted G at the analogous position in guide scaffold 174 both had similar enrichment values as the reference. Taken together, the guide scaffold may prefer having two nucleotides in this scaffold stem bubble, but it may not be a strong preference. These results are further examined in the sections below.

### Pseudoknot Stem Stability is Integral to Scaffold Activity

[1323] To further explore the effect of the pseudoknot stem on scaffold activity, the pseudoknot stem was modified in the following ways: (1) the base pairs within the stem were shuffled, such that each new pseudoknot has the same composition of base pairs, but in a different order within the stem; (2) the base pairs were completely replaced with random, WC-paired sequence. Two hundred ninety one (291) pseudoknot stems were tested. Analysis of the first set of sequences shows a strong preference for the G-A pair to be in the first position of the pseudoknot stem, relative to the other possible positions (positions 2-6; in the wildtype sequence it is in position 5; FIG. 99), while the results demonstrate that having a GA pair at each of the positions 2-6 in the pseudoknot stem is generally unfavorable, with low average enrichment. Having the G-A bases at position 1 likely stabilizes the pseudoknot stem by allowing the rest of the helix to form from stacking, Watson-Crick pairs only. This result further supports that the scaffold prefers a fully-paired pseudoknot stem.

[1324] A substantial number of pseudoknot sequences had positive log 2 enrichment, suggesting that replacing this sequence with alternate base pairs was generally tolerated (pseudoknot structure in FIG. 100). To further test the hypothesis that a more stable helix in the pseudoknot stem would result in a more active scaffold, the secondary structure stability of each pseudoknot stem was calculated (Materials and Methods). A strong relationship was observed between pseudoknot stability and enrichment, and thus activity (FIG. 101: more active scaffold have stable pseudoknot stems), with guide scaffolds with stable pseudoknot stems (<−7 kcal/mol) having high enrichment and guide scaffolds with destabilized pseudoknot stems (>−3 kcal/mol) having very low enrichment.

### Double Mutations Indicate Mutable Regions of the Guide Scaffold:

[1325] Double mutations to each reference guide scaffold were examined to further identify mutable regions within the scaffold, and potential mutations to improve scaffold activity. Focusing on just a single pair of positions-positions 7 and 29 which are predicted to form a noncanonical G:A pair in the pseudoknot stem and supports mutagenesis (see sections above)—we plot all 64 double mutations for this pair of positions (FIG. 102). Canonical pairs are favored at these two positions (e.g. substitution of a C at position 7 and a G at position 29 creates a G:C pair and is enriched; substitution of a C at position 7 and an insertion of a G at position 29 similarly creates a G:C pair, substitution of an A at position 7 and a U at position 29 creates an A:U pair). No pair of insertions was enriched, perhaps because inserting a canonical pair here is not sufficient to stabilize the helix given that the G:A pair is shifted up a position in the helix and not removed entirely. Surprisingly, several enriched double mutations did not form canonical pairs; e.g. substitutions of U at position 7 and C at position 29 (which forms a noncanonical U:C pair), substitutions of U at position 7 and U at position 29 (forming a U:U pair), as well as a few others (FIG. 103). It is possible that a purine:purine pair is substantially more disruptive to the helix than other noncanonical pairs. Indeed, substitution of an A at position 7 and G at position 29 again forms an A:G pair, which is not enriched at this position.

[1326] Enrichment values of double substitutions within each of the key structural elements of guide scaffold 175 were determined from heat maps in which each position could have up to three substitutions. It was determined that the scaffold stem was the least tolerant to mutation, suggesting a tightly constrained sequence in this region.

[1327] The results demonstrate substantial changes may be made to the guide scaffold that still result in functional gene knockout when utilized in an editing assay. In particular, the results demonstrate key positions that may be utilized to improve activity through modifications in the guide scaffold, including increased secondary structure stability of the pseudoknot stem within the scaffold.

TABLE 47
Guide 174 mutations and resulting relative enrichment

| Log₂ | |
|---|---|
| enrichment | Mutations on gRNA scaffold 174* (SEQ ID NO: 2238) |
| 3.25 to 3.5 | G79A, A80G; T34A, G78T; G7T, G75A; G78A, A80T; \hat{ }C2, A33T; \hat{ }A1, C68T; |
| | TG3CT, CGC6TAG, GAG28CTA, CA32AG; TG3CA, GC7AA, GA28TT, CA32TG; |
| | \hat{ }C4, C6G, T12_, G17C, GAG28CCC, C32G, A80C; T9C, T14A, T71A, C73A; C70A, G77T |
| 3.0 to 3.25 | A29T, G78T; T9C, G17C, A27T, G79_; C2G, A21G; \hat{ }A81, \hat{ }C81; T71A, C73A; T14C, T16G; |
| | \hat{ }T64, \hat{ }G81; T9C, G17C, \hat{ }TG65; C2G, T16A; G7C, TC14AT, G17A, T34A; G75A, G77A; |
| | G7C, A21T; T-.3.CA, GC.7.-T, G28_, -A.33.TG, \hat{ }T84; T65C, C82T; |
| | GCTCCC63_, \hat{ }AATGAAAA70, \hat{ }TTTTCATT76, GGGAGC77_; \hat{ }C2, G7A, A27T; |
| | T9C, G17C, C67G; \hat{ }A78, \hat{ }T78; T3C, GCG5AGA, AGC29GCT, A33G; T9C, G17C, G78C; |
| | T3C, GC5TG, AGC29CAA, A33G; T9A, \hat{ }T68, G77A; G7A, T9G; T65A, \hat{ }G77; \hat{ }G70, \hat{ }C75; |
| | C2T, G79C; \hat{ }C66, G78A; A29C, G75A; C15A, A60G; C67G, \hat{ }A78; T14C, G17T, G40A, A76G; |
| | T34A, CT64TC; \hat{ }A69, T69A; T45G, G79T; T69C, \hat{ }C76; C2A, G54C; A13C, C15A, G74C; |
| | C70G, \hat{ }A75; A76G, G77C; C67T, G78C; TG3CC, A29C, CA32GG; \hat{ }T7, A29C; C2A, T34A; |
| | \hat{ }A66, \hat{ }A66; C66T, A80C; \hat{ }G17; \hat{ }C76, \hat{ }A76; A29C; C15G, C67G, T72G; \hat{ }T70, \hat{ }A70; |
| | C15G, T16G; C64T, C66A; T69G, G74C; \hat{ }A3, G74C; \hat{ }T65,\hat{ }T80 |
| 2.9 to 3.0 | A29C, A33T; C64T, G78A; \hat{ }C64, A80T; \hat{ }A74; T65A, \hat{ }A80; \hat{ }T69, G75T; \hat{ }C79, \hat{ }A79; |
| | A29G, T59A; T69G, G75C, G78A; \hat{ }G70, \hat{ }A70; G7A, TC14CG, G17A, C64T; \hat{ }T69, \hat{ }A76; |
| | T9C, G17C, C68T, T72C; \hat{ }T69, A76G; A33T, C66G; C66T, C67G; TTC71ACA, \hat{ }GGATGT75; |
| | A13G, T14A; T69A, G74C; G74T, A76G; G77C, G78A; A27C, T84G; C2_, C66G; T71C, G75C; |
| | TC14AG, G78A; T3G, A33T; T9C, G28A; \hat{ }A1, C2T; C68T, T72C; TGGC3CCAG, C8A, GA26_, --A.33.TGG; |
| | C64T, C66G; \hat{ }A67, C67G; C68T, G74A, G77C; G7T; C2T, G78T; C68_, G77T; |
| | T25C, A29C; \hat{ }A78, G78A; \hat{ }C78, G78C; G7C, A60G; T34A, T45A; |
| | T3_, G7A, \hat{ }A9, \hat{ }T28, A29G, A33_; \hat{ }CAG70, T72G, G--.74.AGT; A27G, A29C; T9C, G17C, T47C; |
| | \hat{ }T19; \hat{ }A65, \hat{ }T65; C67G, C68T |
| 2.8 to 2.9 | T3C, G5T, C8G, GA28CC, CCA31AAG; T69C, A76G; C66T, A80T; \hat{ }G13; C2_, T65G; G7C, T9G; |
| | T9C, G17C, TT71AC; C6G, A29T; \hat{ }C66, \hat{ }C79; C70A, A76T; T3A, CG6AC, AG29GT, A33G; |
| | \hat{ }T7, T12_; \hat{ }T69, \hat{ }A76, A88C; C35G, G58C; \hat{ }A79, \hat{ }T79; T16_, C67T, G79_; G7T, T9A; |
| | A29T, C37T, C66G, \hat{ }G77; C2_, G81A; C15G, T34G; T3_, \hat{ }T9, \hat{ }C28, A29C, C32_; \hat{ }T76, \hat{ }A76; |
| | G7C, A27T; C2_, G79C; TGGC3ACAG, GA26_, --A.33.TGT; \hat{ }G65, \hat{ }G77; |
| | \hat{ }AC1, GC5_, C8T, GA26_, G30A, \hat{ }GT34; T9C, G17C, C66T, A80T; T71G, T72G; |
| | G4C, CT8GC, G17C, GA28AC, C32G, T69C, G75C; C41A, G51T; \hat{ }T78; T9C, G17C, T65A, A80C; |
| | AG29CA, C82G; T9G, C82T; T45A, T47C; C2T, T3A; T65A, A80G; C2G, G4A, C32T; G7C, T59G; |
| | T9C, T14G; C2G, A29C, T52A; T9C, G17C, -A.53.CC; T9C, T69_, A76_; C68A, G75C; A1G, A33T; |
| | T3_, \hat{ }T9, G28_, \hat{ }G32; \hat{ }G70, G75C; \hat{ }C54, G54C; \hat{ }T79, G79A; G17C, C70T, A76G; G77A; |
| | \hat{ }T69, A76C; T65A, \hat{ }C80; \hat{ }A66, G79_; T9G, \hat{ }G85; \hat{ }TGGAAGAT63, C---.66.TCGG, |
| | C68A, GGAGGGAG74_, \hat{ }A83; \hat{ }T2; G7A, A29C; \hat{ }A69, \hat{ }C76; C6A, A29C; |
| | C2_, T9C, G17C, GA79TG |
| 2.7 to 2.8 | T34A, \hat{ }T37; A36T, T65C; C2_, T69G; C73A, G74C; G17_; \hat{ }G65, \hat{ }A65; \hat{ }T67, C67T; C2G, A29T; |
| | T9C, G17C, \hat{ }C66, \hat{ }G74; C70A, T71C; T14A, C15T; G4C, C32G, G78C; T9C, G17C, T34A; |
| | \hat{ }A66, \hat{ }C79; AGT53GTG; G79_; T9G, T14A; \hat{ }C64, \hat{ }C80; T65C, \hat{ }G66; \hat{ }GT1, G7A, T9C; |
| | A60T, G78T; T9C, G17C, C67A, G79A; TC65CG, A80G; T14C, T16C; T3_; |
| | \hat{ }CGAAC70, T71A, G74C; G7T, C8G; T3A, GC7CG, GA28CG, A33T; C66T, G78T; |
| | A1G, T9C, G17C; T69C, C70A; C70T, T72G; T69C, T71G, A80T; T16G, A29C; T11G, A29C; |
| | G17A, \hat{ }TA75, A88C; G7T, G40A, A61G; \hat{ }AC81, A88C; \hat{ }A71; G5C, C8G, GA28AC, C31G, C73T; |
| | G74T, A76C; \hat{ }T68, \hat{ }A76; C2_, C70A; T9C, G28T; G28T, A29C; \hat{ }C29; A29C, GA75AC; |
| | \hat{ }T52, G54C; G7A, T9C, G17C; T9C, G17C, G79A; --A.29.CAC; \hat{ }A68, G77A; \hat{ }T69; G7C, T9C; |
| | A80C, C82T; \hat{ }C75, G75T; T14A, A29C; T72C, C73A; T9C, G17C, C66A, G79_; C2_, A33T; |
| | \hat{ }T2, C64T; \hat{ }AT79, A88C; C66G, A80C; \hat{ }A67, \hat{ }T78; \hat{ }G67, G78A; \hat{ }A76; A21G, \hat{ }C66, \hat{ }T77; |
| | C2A, A36G, T69A; G63T, T71C; T9C, G17C, -G.77.CT; \hat{ }T2, T34A; C68T, \hat{ }C77; T9C, G17C, T72C; |
| | T69A, C70T; CT15TA, A18T; TGG3ACA, C8G, GA28CC, CCA31TGT; T9C, A29C; C6G, G30C; -T.3.AA, |
| | C67G; C73_; \hat{ }G68, \hat{ }A76; T69C, \hat{ }A76; A80G; T69C, A76_; \hat{ }G68, \hat{ }T77 |
| 2.6 to 2.7 | T9A, A29C; A76G; T9C, G17C, AG76CC; T9C, \hat{ }A13; \hat{ }A67, \hat{ }T78, A88C; C70A, T72A; |
| | C66G, \hat{ }T79; \hat{ }T64, C64T; \hat{ }A70, C70G; \hat{ }G65, A80C; T9C, G17C, C66T, G78C; C2_, T9G; |
| | T69_, A76T; T3A, G7A, A29T, A33G; T45G, C68A; \hat{ }T65, \hat{ }T80, A88C; C66G; C64T, T71G; |
| | C2G, G54T; A1G, T3A; \hat{ }G70, G75T; T65A, \hat{ }T80; -T.3.AC, |
| | GC.7.A-, GAG28TGC, CA32GG, T72A, \hat{ }G74, A76G; A21C; T69G, \hat{ }A76; C68G, C70A; |
| | C67T, A80T; \hat{ }A70, \hat{ }C75; T9A, T14C; T3A, CGC6TCT, GAG28AGA, A33T; G54_; C68T; |
| | \hat{ }T65, G79C; C2_; C67G, G79T; CT2TG, G7A, G77C; T71G, G74A; C66T, G81A; A29T; --A.29.CAT, |
| | A88C; T69_, \hat{ }C76; T9C, G17C, \hat{ }G68; \hat{ }A69, T69C; A29C, G30T; T69_; G17C; |
| | \hat{ }A67, G78C; T65A; \hat{ }G79, \hat{ }T79; A76G, G77T; \hat{ }GC1, A88C; A27T, A29C; \hat{ }CA79, A88C; |
| | T69_, G75T; C38G, \hat{ }C56, G77A; C68T, G77C; A29C, AG39GT, T52C; G79T, A80T; G7T, A61T; |
| | T16C; \hat{ }A13; G7C, C15G; G5C, C8G, GA28AC, C31G; C2_, G77C; A29C, T52A; G75C, A76G; |
| | T9C, G17C, \hat{ }C76; C8G, A29C; TGG3GTC, C8G, GA28AC, CCA31GAC; |
| | C64_, \hat{ }GTG67, C68A, G77T, \hat{ }CAC79, G81_; \hat{ }T68, G79_; \hat{ }A70, C70A; T65A, AG76GA; |
| | \hat{ }C70, \hat{ }C70; C68G, G77T; C6T, A29T; \hat{ }T81; \hat{ }G67, \hat{ }A67; TGG3GCA, C8A, A29C, CCA31TGC; |
| | G7A, A27C, A29G, A80G; G78A; T52G, G54C; T9C, G17C, T65A, C67T; A1C, \hat{ }C64, \hat{ }T81; |
| | \hat{ }T80, A80C; C67A, C73T; C73T, A80C; C67A, T69C; G7A, A76T, A80G; C2_, C15G; T69C, G77T; |
| | CT2_, G79T; G7C, \hat{ }G28; \hat{ }C79; \hat{ }A80; \hat{ }G1, \hat{ }C1; \hat{ }G65, A80T; G7T, A29_; -T.3.AC, |
| | GC.7.A-, GAG28TGC, CA32GG, T65A; T9C, \hat{ }T14, G17C, \hat{ }C29; A29T, T69C; T9C, A29G; |
| | C64T, T65C; \hat{ }TG70, T71A, C73_, G75T; T65G, C66T; T59C, \hat{ }C66; T72A, G74A; C2T, T72C; |
| | T71C, A76G; T65G, A80T; TG3_, \hat{ }TG7, GA26_, \hat{ }AG33 |
| 2.5 to 2.6 | T9C, G17C, \hat{ }G81; --A.29.CAT; C68T, A76G; A29C, G79A; G17C, C67G, C70T; \hat{ }G66, C66G; |
| | A29T, G63A, C66A; G28C, A29C; T3G, C67A; T69C, T71C; T3A, GC7CA, GA28TG, A33G; |
| | C70G, G74A; \hat{ }C2, G4C, C8_, \hat{ }CGC28, CCA31_; C2_, C68T; C66A, A80T; |
| | T3A, G5C, GC7AA, GA28TT, C31G, A33T; T9C, G17C, T72G; T9C, G17C, A29C; \hat{ }C70, G75T; |
| | C66T; C66T, G78A; A36T, G54C, C68T; \hat{ }G9, A29T; A76C; T69C, G77C; \hat{ }A77, \hat{ }G77; |
| | T71G, G74C; C67T; C73G; T71G, AG76GA; \hat{ }C64, T65C; T3G, C68A; G74C; C67T, T69A; \hat{ }A69; |
| | \hat{ }A66, C66T; T71C; T14G, T16C; T9C, G79T; T65C; \hat{ }C15, G17C; \hat{ }T65, \hat{ }C79; C70G, T71G; |
| | G74C, G75T; C2_, C68G; G7T, A27G; \hat{ }CA76, A88C; \hat{ }T65, \hat{ }A65; T9C, G17C, T45A; A18C, \hat{ }A66; |
| | A80C; G7C, TC14CT, G17A; TG3GC, G7A, A29T, CA32GC; T16G, A29C, G63T, T71C; |
| | C2A, G54T, T71C; \hat{ }T8, A29C; T9C, TG16GC; C70T, G77T; G75T, A76G; T69A; T16A, A18G; |
| | G77A, G78C; A1_, T59C; T14G, T16G; \hat{ }A60, G81A; A29G, A83G; T34A, GA79TC; T69C, G75A; |
| | G7T, T59A; G7T, C82G; A36T, G81T; C2_, G81T; T14C, T72_; --A.29.CAC, A88C; |
| | TGG3_, \hat{ }AAG9, GA28CT, C31G, A33G; G17C, A18G; C66G, G77A; |
| | \hat{ }C5, C6T, C8_, G28C, GC30CG; C82T; G54A, \hat{ }G56; C2_, C66T; G17C, A18C; G17C, G54_; |
| | G28A, T65C; C6T, A29C; G7A, T9C, \hat{ }T79; T9C, GA17CT; G74A, G75T; C68A, C70G; |
| | G42C, C50G; \hat{ }C70, \hat{ }C75; \hat{ }T66, \hat{ }C66; T3C, CGC6GCT, G28_, \hat{ }A32, A33G; C73A, G74A; |
| | TG3AC, C6A, AG29CT, CA32GG; C67A, G79A; A76_; C73G, G74T; |
| | TG3CA, GC7AG, GA28CG, CA32TG; T9C, T14C, T71A, C73A; G81C; A1G, T16A; T69A, \hat{ }G74; |
| | C68_; C2A, A60C; T9C, G54T; T14C, C15G; \hat{ }G66, \hat{ }G66; T16C, A18G; \hat{ }G68, G77C; A29T, -G.78.CC; |
| | G7T, \hat{ }T61; CT2_, T72G; A1G; T65C, C66A; G7C, T34A; \hat{ }C35, T59G; \hat{ }AG77, A88C; |
| | \hat{ }TG67, A88C; |
| 2.4 to 2.5 | G54C, T59A; T69G, G75C; C68A, A76G; \hat{ }AT65, A88C; C68T, G77T; G7T, A29C; |
| | T65A, T71A, G74A; T16A; \hat{ }C65, \hat{ }A65; \hat{ }T67, G79_; \hat{ }G71; \hat{ }C18; \hat{ }C29, A29T; G79A; |
| | T69G, T71A; T71C, T72C; C2_, T3_; \hat{ }T67, G78T; |
| | CTCCCTCT64_, C73G, AGG76TTC, \hat{ }TCCCA82; T65A, A83G; C70A, G74A; |
| | G7C, TC14AT, G17A, T34C; G7T, A33C, A36C, A76G; T-.3.CA, GC.7.A-, AG29GC, CA32TG; |
| | C2_, A80G; -T.3.AC, C6T, C8_, G28C, G30C, CA32GT; G7C, A83G; C2_, C67A; |
| | T3G, A29C, T34G, G77A; C2G, A21G, T65C; G40A, T59A; \hat{ }A66, \hat{ }G66; G81A; C2_, A29G; |
| | \hat{ }T64, G81A; \hat{ }CGC2, CGC6_, GAG28_, \hat{ }AGG33; \hat{ }C77; T69A, A76G; \hat{ }T78, \hat{ }T78; C66A, \hat{ }C79; |
| | C2_, G7A, T34A; T3C, C6T, G30A, A33G, \hat{ }C55; GC7CG, GA28AG; |
| | T3C, G5C, GC7TA, G28T, C31G, A33G; \hat{ }T68, \hat{ }C77; \hat{ }T77, G77A; A27G, \hat{ }GT77; \hat{ }G66, \hat{ }T79, A88C; |
| | T9C, \hat{ }G69, \hat{ }A76; C68T, G75C; \hat{ }T81, \hat{ }T81; \hat{ }C66; T9C, G28C; T14A, A29C, C66T; \hat{ }A65; |
| | T3A, G5C, C8A, A29C, C31G, A33T; CT2_, T71A; G7C, C15G, A33T; G77A, \hat{ }T78; G63T, C82A; |
| | G7A, C15G, G54A, A60C, G79T; \hat{ }A13, \hat{ }G13; T72G, C73T; A36C, G54T; T3G, G7T; \hat{ }G65, T65C; |
| | T65G, C66G; G77C; T45G; C15A; C41T, G51A; T14A; C2T, G54T; A76T; T71A, A76G; |
| | \hat{ }G66, \hat{ }T79; \hat{ }A7, A29C; TGG3AAC, C8G, GA28CC, CCA31GTG; \hat{ }A1; \hat{ }T29; T71G, G74T; T45A; |
| | \hat{ }AT78, A88C; \hat{ }A3, GG4CC, C8_, GA28CG, CCA31GAT; C66T, C70G; C2_, \hat{ }A66, \hat{ }C79; |
| | \hat{ }TA76, A88C; TG3GA, CG6GA, AG29TC, CA32TC; \hat{ }C80, A80G; G79C; C67G, \hat{ }G77; |
| | \hat{ }C66, G79A; G7A, T16C, \hat{ }T68; G7C, T9C, G17C, G75C; C2_, \hat{ }T58; \hat{ }A65, \hat{ }C80; A1G, -C.68.GA; |
| | G17C, T65G; TG3CC, C6T, C8G, GAG28ACA, CA32GG; T72C, G75A; C64G, A80T; G7A, C66T; |
| | C66G, \hat{ }C79; C15A, G17A; \hat{ }AG66, A88C; A36_; G79T; T9C, G17C, \hat{ }T58; T10G, A29T; |
| | \hat{ }G69, \hat{ }C76; \hat{ }A69, A76_; G7A, A29G; A53_; T65G, \hat{ }A80; C70A, C73A; T59C, G74T; C67A; |
| | G54T, \hat{ }G56; \hat{ }G66; C2_, A29C; C38_, G54_; T3_, C6T, \hat{ }C8, \hat{ }G28, G30A, A33_; -TG.3.ACC, |
| | C6A, C8_, \hat{ }CTC28, A29G, CCA31_; T9C, T14A; C64_; T14G, G54A; |
| | T71C, C73G, A83C; T9C, G17C; A53G, G54T; C66A, A80G; \hat{ }G63, \hat{ }G81; \hat{ }G1; \hat{ }C78, \hat{ }C78 |
| 2.3 to 2.4 | G7A, T9C; \hat{ }T67, \hat{ }G67; C2_, C67T; A80_; \hat{ }G1, A13C; \hat{ }G66, G79C; T69A, A76T; T9C, T14C; |
| | A76G, G78C; T16G, G17T; T69C, G77A; T65_, A80G; G7C, T14C, T34G; C66T, C67T; A53G, -A.80.TC; |
| | C67T, G77C; C73A, G74T; A36G, C68G; T9C, G17C, \hat{ }C78; |
| | TGG3GCT, C8G, \hat{ }AC28, CA32_; \hat{ }T18; \hat{ }C29, \hat{ }T29; |
| | \hat{ }GGGCG63, C68T, TTCGGA71_, \hat{ }CCGCC82; T9C, G17C, C66T, A80G; \hat{ }A67, \hat{ }G67; C2_, G79T; |
| | T3A, CGC6GAT, GAG28ATC, A33T; C2_, A21G, G79C; C2_, A21G; C64T, G77A; C8A, G79C; |
| | C67G, \hat{ }A78, A80C; T69C, \hat{ }A70; G74T, G75C; \hat{ }T76, A76G; A76T, A80G; \hat{ }C64; \hat{ }C29, C50T; |
| | \hat{ }AGCTTA65, \hat{ }ATTG68, T69A, T72C, G77T, GA--.79.AGCT; A29T, G30A; T65C, A80C; |
| | \hat{ }C76, \hat{ }T76; T9C; \hat{ }G67, G79_; C68T, G79T; \hat{ }CTCA3, GCGC5_, \hat{ }CAT28, CCA31_; \hat{ }GA70, |
| | A88C; -T.3.AC, GC.7.A-, GAG28TGC, CA32GG; A21G; \hat{ }G69, T69C; G7A, \hat{ }C66, \hat{ }G74; \hat{ }T65, \hat{ }A79; |
| | T65G; G74A, A76C; G74T, G75A; \hat{ }G68, G77T; T9G, G79T; \hat{ }AG67, A88C; \hat{ }C81; \hat{ }A67, G78T; |
| | C37A, G57T; G54C, G79T; G75T, G77A; G40A, TAG52CCT; \hat{ }G15; C67A, C68A; A36T, \hat{ }C55; |
| | A36T, T59A, T65C; C67T, \hat{ }G68; T71C, A76C; G7C, A29G, T65A; \hat{ }A78; T69C, G75T; |
| | \hat{ }TC66, A88C; CT2_, T59A; T9C, G17C, T65G; C70G, G75T; C2_, C73T, G75A; |
| | TG3CC, C6G, C8T, G28A, G30C, CA32GG; C64G, C66T; T11C, A29C; T9C, \hat{ }G15, G17C, T65C; |
| | T69G, G74T; \hat{ }GA65, A88C; G7C, A61G; \hat{ }T65, \hat{ }A80; C68_, \hat{ }C79; G7A, \hat{ }T29, G79T; A27T; |
| | A1_, T9G, T59C; T14G, -G.79.TT; T14C, T16A; C70A, G74T; T65A, G78A; \hat{ }T65, \hat{ }G77; |
| | T9C, G17C, \hat{ }G68, G77C; C66A, \hat{ }A79; G7T, T9C, G17C; \hat{ }G69, A76T; C2_, A21C; \hat{ }T29, A29T; |
| | \hat{ }G69, \hat{ }T69; C6T, T10C, T84G; T65C, C67T; C15T; G78C; G7T, A27G, C44T; \hat{ }C68, \hat{ }A68; |
| | A1G, T9C, G17C, A76G; A36T, T59A; T14A, T16A; \hat{ }C66, G79_; -T.3.AA, G7_, AG29GC, CA32TG; |
| | C8G, \hat{ }A70, \hat{ }T75; C66A; \hat{ }C64, A80_; T69C; T71G, A76T; CT68TC, G74A; G54C, C68T; |
| | T9C, G17C, G81T; C2_, A13G; T65A, \hat{ }C81; \hat{ }C66, \hat{ }A78; \hat{ }C70, \hat{ }A75; \hat{ }T68, G77T; |
| | A29T, C50T, A53G, G79T; C68T, A76T; T16C, A18T, A80C; \hat{ }TGGAAGAT63, C---.66.TCGG, |
| | C68A, GGAGGGAG74_, \hat{ }A83, A86C; -T.3.AA, G7_, AG29GC, CA32TT; T9G, A29G; |
| | C68A; A27C, A29T; A36T, G54C; \hat{ }A4; \hat{ }A73 |
| 2.2 to 2.3 | \hat{ }C66, A76_; \hat{ }G65; \hat{ }T1, T59C; A36T; T3C, GCG5CGA, AGC29TCG, A33G; |
| | T9C, TG16GC, C68T, G79A; G7A, T14A, G17A, T34A; T65G, G79T; G7C, TC14CT, G17A, T34A; |
| | T3C, C67A; G77C, G78T; C2T, \hat{ }G56; C6T, A83G; G7T, C8A; C66G, G79_; TG3_, C--.8.TCG, |
| | \hat{ }C28, \hat{ }C30, CA32_; C67T, T69G; CT2_, T9C; G78T, G79A; C2_, T9C, C15A, G17C; |
| | T9C, G17C, \hat{ }TG67; G75T, A76C; \hat{ }C76; G79A, A80T; TT71GG, G74C; C70_, G75C; \hat{ }G66, G79T; |
| | T34A, A60G; A29T, C64T, C66A; \hat{ }CT29, A88C; \hat{ }G69; A53C, G79T; \hat{ }T80, A80G; \hat{ }G67, C67A; |
| | C67A, G78C; T9C, G17C, C70T, T72A; -T.3.AC, GC.7.A-, A29_, A-.33.GT; C2G, \hat{ }T58; |
| | A27G, \hat{ }A70; A39G, G78C; -G.78.AA, A80C; C66G, C67A; \hat{ }G68, \hat{ }A68; T69C, T71A; |
| | G7T, G40C, AG53GA; T9C, G17C, G79T; C8A, C66T; G74T, A80C; G7C, T14G; \hat{ }C77, G77T; |
| | G58T, G79C; T14C; \hat{ }T65, \hat{ }A80, A88C; C68A, \hat{ }C77; GC--.63.ATTA, CCC66ATT, G-- |
| | GG.77.AATAT, GC81AT; T11G, A29T; T14A, T16G; T71C, G75A; \hat{ }T67, \hat{ }C78; T65C, G81A; |
| | G79C, A80T; \hat{ }C66, \hat{ }G74; A53C, G54A; \hat{ }C66, \hat{ }C79, A88C; G79C, A80G; |
| | T9C, G17C, \hat{ }C66, \hat{ }G74, A88C; C2_, T16C; T69G; \hat{ }G68, \hat{ }A76, A88C; T71A, G74C; G74T; |
| | G7T, C37A; \hat{ }CA68, A88C; \hat{ }T12, \hat{ }G12; A29T, C64T, C70T; G7C, A29G; G7A, T14A; T69C, C70G; |
| | G79T, A80C; C2T, G54C; \hat{ }T58; G7T, G30A, G81T; A29C, A83G; C2_, T69C; |
| | T3C, G5C, G7C, A29G, C31G, A33G; T72G; C64A; T34G, T59C; A1G, A60C; T65A, G79A; |
| | A27T, \hat{ }C29; \hat{ }G67, \hat{ }G77; \hat{ }G68, C68A; C64G; C66T, G77A; \hat{ }C64, \hat{ }A80; C2_, C73T; A29G; \hat{ }T7; |
| | A1_, A46C, T59C; T9C, G17C, A76T; G78C, A80G; \hat{ }C66, A76C; \hat{ }T29, \hat{ }T29; |
| | A27T, CT68TC, G74A; G75C, A76C; \hat{ }TT81, A88C; \hat{ }G77, A80G; \hat{ }C5, G7T; \hat{ }C66, T69C; |
| | C15A, T16A; C73T; \hat{ }A65, \hat{ }A80; \hat{ }T65, G79_; G40A, T52C; G7T, A60T; |
| | TG3GA, GC7CA, A29G, CA32TC; \hat{ }TA70, A88C; \hat{ }C66, \hat{ }A66; \hat{ }G67; A36C, \hat{ }T55, C68T; T65_; |
| | G63_, C82_; C2A, A29G |
| 2.1 to 2.2 | A83G; G75_; C68_, G79_; C2_, A46C; \hat{ }C4; \hat{ }A69, \hat{ }A69; G42A, C50T; A53G, \hat{ }T55; A36G, \hat{ }C58; |
| | TG3AC, C8A, GA28TC, CA32GG, T59C, C66A; C2_, A46C, C66T; C64T, G81T; \hat{ }A68, G77T; |
| | \hat{ }T80, A80T; T25G, A29T; G4A, C32T, G54_; \hat{ }T68; A76C, G78A; T9C, T14C, G17C; CT2_, A33C; |
| | \hat{ }CA65, A88C; A60C; \hat{ }A69, \hat{ }T69; T9C, G17C, -T.65.GC; A18C, A61G, A80C; CT15TG, A21C; |
| | T72G, A76T; G7C, A29C; \hat{ }G79, \hat{ }C79; T69G, \hat{ }T76; C70A, G74C; T9G, A29C; C2_, G54A; |
| | C15G, T72A, G74A; \hat{ }A75; T3_, C6T, \hat{ }C8, A29_, C32A, \hat{ }C34; \hat{ }C29, A80C; G74A, A76T; |
| | C68T, T69C; T3_, C64T; A80T; CT2_, T9A; \hat{ }C29, A36C; \hat{ }GA67, A88C; T9C, G17C, T59A; |
| | A60T, C64T; T65A, G79T; A29C, T65C; \hat{ }T7, A13C; C8A, C82T; A76G, \hat{ }C77; |
| | T3G, GC7CT, GA28AG, CA32AC; ---TT.71.AAGAA, G75_; G7T, C15G; \hat{ }C79, \hat{ }C79; |
| | TG3GA, CG6AC, A29G, CA32TC, C68T, T72C; T72C; G63C, C82T; \hat{ }TG56, G57T; |
| | T14C, A29T, A36T; \hat{ }T68, \hat{ }T68; T69G, T71G; \hat{ }G66, C66T; \hat{ }G68, G77A; G54C, G79A; G7T, C67G; |
| | C66G, G78A; A60C, A76G, A80G; G40A, -A.76.CC; C2T, C67A, \hat{ }T78; T9C, G17C, G77A, G79T; |
| | G77T, G78A; \hat{ }T78, \hat{ }C78; \hat{ }T68, G77C; \hat{ }A67, \hat{ }G77; C73T, G75A; A29T, C66A, G74T; C2G, A36G; |
| | T3G, G5A, GC7CA, A29G, C31T, A33C; T69A, T71C; \hat{ }CG2, G5_, C8_, --G.28.CGC, CA32_; |
| | \hat{ }GT79, A88C; C68A, G77T; C64T; G40A, G77C; C68G, C70G; C2T, G78A; |
| | T9C, G17C, \hat{ }C66, A76C; G7T, A29G, C82T; C2_, T65G, A80G; TGG3GCT, C8G, \hat{ }CC28, CC31_; |
| | A29G, T69C, A80G; T34A, A36_; T9C, G17C, A27G; C15T, T16C; |
| | G7T, T9C, G17C, G40A, TA52AT; A36G, T71A; C6T; \hat{ }G69, A76_; C66A, G79A; \hat{ }C68, \hat{ }T68; |
| | A21T, C67A; A21C, T72G, G77T; T71G, A76G; C2T, G54A; T71G, G77A; |
| | T9C, G17C, A29G, G81A; G7A, A36T, G54C, C68T; T3A, T59A; \hat{ }G70; \hat{ }T77; \hat{ }T68, \hat{ }C77, A88C; |
| | TC14GT, T72C; T9C, G17C, T72_; \hat{ }C73; G7C, T14C; A36T, \hat{ }T58; G54T; T59C; |
| | A29C, C50T, A60T; G54A, C70G, \hat{ }T75; \hat{ }C66, G77C; C15G, G17C; C64G, \hat{ }C81; |
| | T3A, G5C, GC7AG, GA28CT, C31G, A33G; A29C, C32A; \hat{ }G28; A21G, A53G; G75A, A76T; |
| | G7C, TC14CT, G17C, T34A; G28A |

*mutated sequences are ‘;’-separated and multiple mutations per sequence are ‘,’-separated

TABLE 48
Guide 175 mutations and resulting relative enrichment

| Log₂ | |
|---|---|
| enrichment | Mutations on scaffold 175* (SEQ ID NO: 2239) |
| 3.2 to 3.5 | C73A, \hat{ }T78; C6T, A29C, G71C, \hat{ }G80 |
| 3.1 to 3.2 | C17G, A87C; T3G, CGC6ACT, GAG28AGT, A33C; G7T, C9T, C17G, CG81GA; T16G, A29C; |
| | C9T, C17G, C65A, A87G |
| 3.0 to 3.1 | A68T, T83G; A27G, T92C; TGG3ATC, GC7AG, GA28CT, CCA31GAT; \hat{ }C65, A87G; G7T, A29T; |
| | T3G, GC7AA, GA28TT, A33C; C9T, C17G, C65_; G7T, T14G; \hat{ }G54, G78T; C9T, C17G, \hat{ }A80; |
| | TC16AT, G64C |
| 2.9 to 3.0 | C15T, T34A; C9T, C17G, A88T; G7A, C15G; \hat{ }C76, \hat{ }G76; CT2_, C15_, T58A; C2_, C15G; |
| | C9T, A29C; C9T, C17G, A85T, A88T; C9T, C17G, \hat{ }CA63; G7T, C9G; A87T, A88C; C73G, G78A; |
| | A29T, A91G; TG3GA, G7A, A29G, CA32TC; \hat{ }G14, A29T, A87G; C9T, C17G, T74C; C2_, \hat{ }A53 |
| 2.8 to 2.9 | C9T, A33T; G7T, T67G, G82C; \hat{ }T5, C9_, GAGC28CGCA; G7T, \hat{ }A68, \hat{ }A82; G7T, \hat{ }C60; |
| | T14G, A29C; A29T, T66A; T3A, CG6TC, AG29GA, A33T; C2T, TC75AT; \hat{ }CG76, A88C; |
| | G7T, T14A, T83_; -T.3.GA, C6T, C9_, G28C, G30C, CA32TC; CT2_, C15T; |
| | TG3_, \hat{ }GT8, G30C, C32G; T14_, A29C; C9G, C17G, A29C, T79G; |
| | TG3AC, G7C, A29G, CA32GT, G86C, A88C; T3A, GC7CA, A29G, A33T; G7C, C80A |
| 2.7 to 2.8 | G7T, A91C; \hat{ }C2, G4C, G7_, A29_, C32G, \hat{ }G34; CT2_, A88C; C65G, A88C; G7T, -T.79.AA; A29C; |
| | T3A, GC7CA, A29G; C8G, A29C, A88_; A29T; C2_, A29C; A29C, C31T, A33G; T14G, C15T; |
| | C9T, C15A; \hat{ }GA1, G7A, C15A, C17G; C15A, T16A; CT2_, A29C; C9T, C17G, G78_; |
| | C9T, C17G, G-.78.AT; C73T, C76G |
| 2.6 to 2.7 | C9T, C17G, C65_, \hat{ }A84; C9T, C17G, G70T, C81A; T74A, T79A; T3C, C6T, AG29CA, A33G; |
| | G7A, \hat{ }T29; C76G, G77C; GG77CA, A87G; T16G, A29T; T3A, G5A, A29C, C31T, A33G; |
| | C9T, C17G, \hat{ }AA53; TG3CA, GC7AA, GA28TT, CA32TG; G7A, A29C; T3G, G7T; CT2_, A68G; |
| | T14_, A29T; C2_, C9T, C17G; \hat{ }G3, GC.7.-T, G28_, \hat{ }C34; G7T, \hat{ }T92; G7T, \hat{ }G69, G82T; |
| | \hat{ }GGCAGATCTGA64, T66C, A68C, GA71AG, \hat{ }C75, G77T, T79C, CGTAAGAA81_; |
| | T3A, C6G, AG29CC, A33T; C80T, \hat{ }A81; C81T; CT2_, C17A; C15A, T16G; C2_, T16G; |
| | G71_, C80T; TG3AC, GC7AG, GA28CT, CA32GG; T3A, G5C, G7T, C31G, A33T; |
| | T3G, G7T, C9T, C17G; G64T, A85T; G7C, T14_; C9T, A29T; G7T, \hat{ }G14; A88G, \hat{ }C89; CT2_, A33T; |
| | C81T, \hat{ }A82; C9T, C17G, A29C, C32A; C9T, C17G, \hat{ }GA77 |
| 2.5 to 2.6 | G7C, C15G; C9T, C17G, TC75GT; TG3CA, CG6GA, AG29TC, CA32GG; G7T; T14A, T16G; |
| | G7T, C9T, G71_, \hat{ }T79; C15A; CT2_, A33T, C73_; C2A, C9T, C17G; CGC6TCA, GAG28TGA; |
| | C15G, A29C; C2_, T16G, A91C; \hat{ }T81, C81T; TG3AA, A29C, CA32TG; G4A, G7T, C32T; |
| | T3C, CGC6GCT, GAG28AGC, A33G; T3A, G7A, A29T, A33G; -G.4.CC, G7_, AGCC29GCGG; |
| | C65T, G86_; C9T, \hat{ }A16; A36G, \hat{ }C57; A1_, T16G; C6T, G7T; \hat{ }G14, A29T; \hat{ }AT16, A88C; |
| | C8G, A29C; \hat{ }G64, A87C; \hat{ }G70, \hat{ }T79; T16A, \hat{ }C29; |
| | TG3GA, C6G, C8T, GAG28ACC, CA32TC, G71T; G7T, A29C; T3G, GCGSAGT, GC30CT, A33C; |
| | \hat{ }C2, \hat{ }T14, A29T; C9T, C17G, A88_; C9T, T16A |
| 2.4 to 2.5 | TGG3ACA, A29C, CCA31TGT; T3_, G5A, G7C, \hat{ }G9, \hat{ }C28, A29G, C31T, A33_; C15A, A29T; |
| | G64A, \hat{ }T65; CT2_, A27G; \hat{ }A16, \hat{ }T16; G7T, C15A; G7T, C9T, C17G; C2G, A29T, T66A; |
| | TG3GA, CGC6TTA, G28T, G30A, CA32TC; A1C, G82C; A27C, A29C; C9T, C17G, \hat{ }GA71; |
| | T3C, \hat{ }T6, CC.8.T-, C17G, GAG28AGA, A33G, \hat{ }G54; \hat{ }T16, A27T, A29C; G64C, \hat{ }A87; \hat{ }C14, A29C; |
| | \hat{ }A65, \hat{ }T65; C2T, C9T, C17G; C9T, C17A; G70A, C81A; C2G, A36T; |
| | G5C, C8G, GA28CC, CC31GA; C6T, A29C; C80T, \hat{ }G81; T-.3.CA, G7_, AG29GC, CA32TG; |
| | \hat{ }C78, G78A; G7A, T14_, CT65TC; -T.3.AA, G7_, AG29GC, CA32TG; \hat{ }C29, A29T; G7A, A29T; |
| | TG3GA, GC7CA, A29G, CA32TC; \hat{ }T64, G64A; C15A, A29C; T75A, G77T; \hat{ }A3, \hat{ }T3; A27T, A29C; |
| | T14A, A29C; T74C, G77A; G7C, A29G; C9T, C17_; G5A, G7A, A29T, C31T; \hat{ }C63, \hat{ }A63; |
| | G7T, A91G |
| 2.3 to 2.4 | CT2_, G64T, T66G; G28T, A29C; T3G, G5T, GC7CG, GA28CG, C31A; |
| | TG3AC, G7C, A29G, CA32GT; C9T, C15A, C17G, A29C, \hat{ }TG55, G57A; \hat{ }C14, A29T; |
| | C9T, C17G, GC64TG; G7A, \hat{ }T29, A36C; \hat{ }T16, \hat{ }G54; TG3CA, C8A, GA28TC, CA32GG; |
| | G7T, C9T, C69G; C9T, C17G, \hat{ }A70; A72_, T79G; T3A, G5T, C8T, GA28AC, C31A, A33T; |
| | C9T, C17G, A29C; \hat{ }G54; G7A, TC14CT, C17A; C9T, C17G; \hat{ }G70, \hat{ }T79, A88C; \hat{ }A64, \hat{ }G64; |
| | T14G, A29T; C9T, T16_; \hat{ }A14, \hat{ }T14; \hat{ }AC1, GCG.5.--T, GC30_, \hat{ }GT34; A29C, A91G; C2_, T14A; |
| | C9T, \hat{ }A17; C9T, C17G, G78A; T3G, G5A, A29C, C31T, A33C; C9T, \hat{ }G17; G7T, A29G; |
| | TG3GA, C6G, C8T, GAG28ACC, CA32TC; \hat{ }T1, CG6TC, C9T, C17G; C17A; \hat{ }T17, \hat{ }A17; |
| | T3A, G5C, GC7AG, GA28CT, C31G, A33G; \hat{ }GC72, A88C; T3G, G7T, A33C; |
| | TG3CA, CG6GA, AG29TC, CA32TG; T3G, G5C, C8G, GA28CC, C31G, A33C; \hat{ }T3, C80G; |
| | C9T, C17G, T45G, \hat{ }G54; C9T, C17G, A72C, T74G; G5C, C8G, GA28AC, C31G; A29T, G56T; |
| | G7T, C63A |
| 2.2 to 2.3 | A36T, A85C, A87T; T14A, C17G; C9T, C17G, \hat{ }G54; G4C, C8G, GA28AC, C32G, A87G; \hat{ }T72; |
| | A85C, A87C; G7T, T92C; C9T, C17G, \hat{ }C63; TG3AA, C6T, AG29CA, CA32TT; |
| | C9T, C17G, A85G, A88G; G64C, \hat{ }G88; G7A, \hat{ }T29, A68C; \hat{ }A13, T14C; |
| | C9T, C17G, \hat{ }G54, A85C, A88C; -GG.4.CAT, C9_, GAGCC28CGATG; |
| | TG3AC, C6A, AG29CT, CA32GG; C9T, \hat{ }C63; C9T, A88C; A27T, A29T; C9T, C17G, \hat{ }G54, A91C; |
| | G86A, A88T; TG3CA, GC7AA, GA28TT, CA32TG, C69T; T74G, G77T; |
| | TGG3ACA, C8G, GA28CC, CCA31TGG; G7A, C17A, \hat{ }G81; G7T, A59G; \hat{ }A65, \hat{ }G86; C73T, G78T; |
| | \hat{ }C72, \hat{ }T79; A1G, C9T, C17G; \hat{ }G1, C9T, C17G; \hat{ }G72, \hat{ }C72; C2_, A29T; \hat{ }T14, A29T; \hat{ }G64, \hat{ }T87; |
| | \hat{ }A65; \hat{ }C18, \hat{ }T18; \hat{ }G64, A88C; C9A, A29C, G57T; G7C, \hat{ }G28; G77A; G7A, TC14CT, C17G; C2_; |
| | G7C, T14A, \hat{ }T86; C9T, C17G, A53G; T3G, GC7CT, GA28AG, G86T; C9T, C17G, A29C, A91G; |
| | C9T, T16_, A91C; CT2_, \hat{ }G64, C65A; C15_; T16G, C17T; G7T, G28A |
| 2.1 to 2.2 | C9T, C17G, A29T; A87C; \hat{ }CT18, A88C; C9T, C17G, \hat{ }G64; C17G; C15T; \hat{ }T16, T79C; |
| | \hat{ }A64, G64A; A1C, T3G, C9T, C17G; GA28CC, \hat{ }T65; C15A, C17A; G78C, T79G; A29C, T58G; |
| | C2_, G7A, -C.65.AA; CT2_, A29T; T3A, A33T; G4A, CGC6GTA, G28T, G30C, C32T, T67_; |
| | C9T, C17G, C65_, A91C; \hat{ }T65, A87G; A88_; G7T, C9A; C9T, C17G, C65A; |
| | TG3GC, C6T, AG29CA, C32G; G7T, T16A; G7T, G70C, C80A; G7T, T14A; |
| | TG3AA, GC7CG, GA28CG, CA32TG; \hat{ }G54, A91C; C73_, G78_; |
| | T3C, GC5TG, C8T, GA26_, G30A, \hat{ }CG34; \hat{ }CT3, A29C; C2T, T14G; G7C, A29T; C9T, TC16GG; |
| | T3G, C8T, GA28AC, A33C; \hat{ }G16, \hat{ }T16; C9T, C17G, A36C; TGG3AAC, C8G, GAG28_, A---.33.GGGT; |
| | C9T, C17G, A87G; \hat{ }T72, T79G; \hat{ }G17, C17T; CT2_, A39C, A88C; T3G, A33C; |
| | T3_, A33G; C-.2.TG, TC75CA; G7C, C9T, C17G, \hat{ }G92; C9T, C17G, G82C; C9A, A29C; |
| | C2_, C9T, C17G, A91C; C2_, A29C, A91C; CT2_, C9T, C17G; G7T, A60G; \hat{ }C71, \hat{ }T71; |
| | C2_, G77T, A91C; C2_, A29G; \hat{ }T71, C80G; T3A, G7A, A29G, A33T; C9T, A29G |
| 2.0 to 2.1 | C65T, \hat{ }A66; CT2_, C15_, T58A, A72C; C9T, C17G, C73A, C76A; C2_, A91C; C80T; |
| | T3A, G7C, C9T, C17G; \hat{ }C63, \hat{ }G88; G7T, A61T; GC62_, C65G, T67G, A72T, T79A, AAGA.84.--- |
| | C, G89C; T3G, C9T; T16A, C17A; C6T, A29T; T3C, GC5CG, C8T, GAGC28ACCG, A33G; |
| | G7A, C15T; \hat{ }T2; C15G; C9G, A29T; C15T, A29T; G7T, \hat{ }C14; \hat{ }A64, A88T; A29C, G30A; |
| | C2_, A29C, A46C; C9T, C17G, A72T, G78A; \hat{ }A87, \hat{ }T87; C9T, A59C; |
| | TG3AC, C8A, GA28TC, CA32GG; C9T, C17G, \hat{ }G64, \hat{ }G88; A29C, G71A, C80T; |
| | T3C, A29T, AC68TA; \hat{ }A17; C9T, C17G, G64T, T66C; G7A, T16G; C17T, C65G, G86C; |
| | C69T, G82C; A1T, C2A; T14A, \hat{ }C29; \hat{ }A15, C15T; G7T, T16G; T3A, GC7CA, GA28TG, A33G; |
| | \hat{ }T81; T16C, A29C; A29C, A91C; G71A, A88T; \hat{ }C65, A87G, A91C; C9T, C17G, A29T, \hat{ }A53; |
| | G71T; \hat{ }A80, \hat{ }A80; C9T, C17G, A36G; C9T, C17G, T--.54.CTG; T16A, A29T; \hat{ }G77, T79C; |
| | C9T, C17G, G64C; TG3AC, CG6GA, AG29TC, CA32GG; A36T, C37T; A29C, \hat{ }C65, A85_; |
| | C15G, A29T; \hat{ }A70, C81T; A29T, A33G; C73A, C80T; C9T, C17G, G82_; C9T; C69T, A84G; |
| | C2_, C9T, C17G, A46C |
| 1.9 to 2.0 | C2_, A29G, A91C; A68G, T83C; C9T, T14A, C17A, \hat{ }AG85; \hat{ }T66, \hat{ }G85; |
| | G62T, CT65_, C69A, G71A, C80T, G82T, A85C, AGC88_; T3_, G5T, \hat{ }A8, -A.29.TC, C31A, A33_; |
| | G7A, T14C, C17A; T3G, CG6TC, AG29GA; \hat{ }T54; \hat{ }C8, \hat{ }T8; G7T, AA87TG; A72C, C73A; |
| | C2_, C6T; \hat{ }C29; G71C, C81_; C9T, C17G, G64_, A88_; C2_, A88T; |
| | T3G, G5C, GC7TG, G28C, C31G; C9T, C15T, C17G, A36C; G7T, T34G; T14A; \hat{ }T73, \hat{ }C78; \hat{ }G64; |
| | \hat{ }G15, C15T; A36C, \hat{ }A57; A-.72.GC, \hat{ }T79; T16A, A29C, \hat{ }A58; C9T, C17G, \hat{ }T52; C2_, A85T; |
| | \hat{ }C29, A29G; G7T, T14C; C2A, \hat{ }T57; G7T, C15G, T34G; T14G, C17T; T14C, C15T; |
| | T3G, G5A, GC7TA, G28T, C31T, A33C; \hat{ }C71, \hat{ }T79; \hat{ }T14, A29C; \hat{ }A1, A36C; \hat{ }C63, \hat{ }G89; |
| | G7C, A91G; T14C, A29C; C9T, C17G, G78T, C80T; \hat{ }G69, G82C; TGG3GCA, G7T, CCA31TGC; |
| | C6T, A29C, G71C, \hat{ }G80, A91C; A13C, A29C; \hat{ }C63, A88T; G7T, T14_; C2_, GG77AA; |
| | C9T, C17G, T58A; C2_, G77T; C2_, T3_; C9T, C17G, \hat{ }AA53, A88C; G7T, C9T; G7A; |
| | CG6GC, AG29GC, C32A; C63T, TTA66GCC, GA71_, TC79_, TAA83GGC, A87C, G89_; |
| | G7C, C17G; C2_, A46C; C9G, A29T, C37T, \hat{ }A56 |
| 1.8 to 1.9 | \hat{ }G69, A72C, G82C; \hat{ }G70, T79G; G7A, C15A; \hat{ }T36, \hat{ }A57; \hat{ }G70, \hat{ }C79; |
| | TGGCG3CACAT, GCCA30TGTG; G71A; TG3AC, C8A, A29C, CA32GT; T10G, A29C; |
| | \hat{ }A65, G77A, \hat{ }G86; C9T, C17G, A88_, A91C; \hat{ }C78, \hat{ }A78; G7T, C90T; |
| | T3G, G5A, GC7TG, G28C, C31T, A33C; G7T, C9G, G86T; A29C, C31T, A33C; A29C, G70A; |
| | A-.88.GC, A91C; \hat{ }A17, A36C; T3C, GCG5TGA, AGC29TCA, A33G; |
| | T3C, CGC6GCT, GAG28AGA, A33G, A88C; C35G, \hat{ }C58; T74A, G78C; C9T, CA17GT; |
| | G7A, C17G; C9T, C17G, \hat{ }GT70; CTG2_, A29C; C2_, A68G; \hat{ }T64, \hat{ }T88; T3G, A33T; |
| | C2_, T16G, A29C; \hat{ }A1; A36T, \hat{ }G55; C9T, C17G, C63A; C9T, A18G; C2T, A36T; \hat{ }A81, \hat{ }A81; |
| | C9T, T14G, C17G; -A.72.CC, A91C; A29T, T79G; G7A, A29T, A59G; G7C, \hat{ }C78; \hat{ }AG64, A88C; |
| | CT2_, C9T, C17G, C69T; C2_, A46C, A91C; \hat{ }C89, A91C; \hat{ }C29, A68C; C2_, G64T; -C.15.GT, A27C; |
| | CT2_, T10G, A88C; T14C, A29T; C9T, C17G, C76T; A84G, A87C; G7C, C9T, T14A, C17G, T34A; |
| | G70T, C81A; T14G; \hat{ }T3, A29T; G7T, \hat{ }T29; A29T, C65A, T67G; G64C, A87G; C9T, T14A, C17G; |
| | \hat{ }T57, A87G; TGG3ATC, A29C, CCA31GAT |
| 1.7 to 1.8 | C2_, G70A; C9T, C17G, \hat{ }GA77, A88C; C9G, C17G, A29C; \hat{ }T70, \hat{ }T81; G7C, C9T, C17G; |
| | T3G, CGC6TTG, G28C, G30A, A33C; \hat{ }A16, A68T; C9T, C17G, T67C; G7T, \hat{ }C14, A33C; |
| | G7A, T14_; \hat{ }C14, \hat{ }T14; C9T, C17G, GG77TT; C2T, C80T; \hat{ }T64, A88_; \hat{ }G54, A68C; G7T, CT9AG; |
| | C9T, C17G, T79G; T79G, C80T; \hat{ }AT3, A88C; \hat{ }AG54, A88C; C2G, A33C; C2_, A88T, A91C; |
| | C9T, C17G, T58C; C2_, C73T; TGG3CCC, C8G, GA28CC, CCA31GGG; G7T, T10G; |
| | C9T, C17G, \hat{ }A80, A91C; \hat{ }T64; T14_, A29C, A91C; G7A, G28T, AAAGCGCTTA59_; G7T, G71_; |
| | \hat{ }A17, \hat{ }A17; T14_, A29T, A91C; C17G, A72G, T74C; \hat{ }T88; CT2_, A94C; A27G, A29C; |
| | A85T, A87G; C9T, C17G, \hat{ }AA79; C9T, T14A, C17G, T34A, \hat{ }G64, G86T; C9T, C17G, T45G; |
| | C2_, C9T, C17G, C65T; \hat{ }G3, G5C, C9_, GA28CG, C32A; T74G, G78T; TG3_, --C.8.GCT, |
| | G28_, \hat{ }G33; A39T, T54A; C2_, A72G; C9T, C15T, C17G; |
| | TG3CA, CG6GA, AG29GC, CA32TG; G64C, A88G; C15A, C17G; C2_, C65A; \hat{ }G64, G86A; |
| | \hat{ }C29, A36C; G64T, T66A; TG3GT, A29C, C32A; \hat{ }A64; C81G; C9T, A72T, T79C; |
| | C9T, C17G, G77T |
| 1.6 to 1.7 | A72G; \hat{ }C14, A29C, A36C; T3C, C9T, C17G; G4C, C8G, GA28AC, C32G; C2_, G71C, \hat{ }G80; C76T; |
| | C9T, T14A; C2G, C9T, C17G; G70T, C81G; C17G, \hat{ }T54; A72C; C2_, C9G, C17G; |
| | TG3GC, C8T, GA28AC, C32G; TGG3GCT, C8G, \hat{ }CC28, CC31_; C9T, C17G, A39T, A-.53.GC; |
| | \hat{ }T16; T67C, A87C; \hat{ }G81, C81T; C76G, G78C; A1C, G56A; TG3CA, GC7AG, GA28CT, CA32GG; |
| | C9T, C17G, C65G, \hat{ }A87; G86A, A88C; G7T, C9T, C17G, \hat{ }A72, G78A; \hat{ }G70, C80A; \hat{ }A17, A68C; |
| | C2_, C80G; \hat{ }C71, \hat{ }T79, A88C; C9T, C17G, \hat{ }T57; \hat{ }T2, C9T, C17G; T45G; G64C; T14_; |
| | C65T, G86A; C69T; \hat{ }C65; G64T, C65A; T3G, GC7CT, GA28AG; \hat{ }A1, \hat{ }A53; |
| | T3A, G5C, GC7AT, GA28AT, C31G, A33T; C9T, C17G, \hat{ }CA72; C9T, C17G, C73A, T79A; |
| | C2_, A53G; TGG3GTC, C8G, GA28CC, CC31GA; \hat{ }C5, G7T, C9T, C17G; G71T, C80T; C15T, T16G; |
| | G7C, C9T, C17G, C76A, G78T; G64T, T66C; \hat{ }C65, A91C; C73T; A72C, G78T; \hat{ }C63; A68G, C81T; |
| | \hat{ }GT87, A88C; C9T, C17G, \hat{ }A78; T3A, GC5AG, C8T, GAGC28ACCT, A33T; \hat{ }A1, \hat{ }T54; |
| | A29C, G56A; C2_, C80T; \hat{ }TA17, A88C; A72G, C73T; A29C, C31T, T83C; G7T, A27T; |
| | T3C, G7T, G40A, \hat{ }T54; A88C; ; G64T, A87C; T3_, \hat{ }T9, G28_, \hat{ }G32; \hat{ }GT16, A88C; -T.3.AC, |
| | G7A, C9_, GAG28TGC, CA32GG, A84C, G86T; \hat{ }T65; C76A, G77T; \hat{ }G14, A29C; |
| | G64C, A88C; A72_, T79G, A91C; \hat{ }C29, A68C, A72C; TG3AT, GC7TT, G28A, CA32AT; |
| | C9T, C17G, T--.54.CTG, A88C; G7T, A59C; CC8GT, C17G; G7C, T14C, \hat{ }T86; |
| | \hat{ }CA3, GC5_, C8G, GA26_, G30C, \hat{ }TG34 |
| 1.5 to 1.6 | T3A, \hat{ }A5, G7_, AGC29GCT, A33G; C9T, C17G, \hat{ }C73, G78C; G71A, A72G; AG27TA, A88T; |
| | G7T, A91T; \hat{ }T57, A91C; \hat{ }T2, A68C; \hat{ }T2, A36C; G7T, T10C; \hat{ }A64, A88G; |
| | TG3CA, C6T, C8T, GAG28ACA, CA32TG; \hat{ }T54, A68C, A72C; G7T, A61G; |
| | GCGC5CAAG, GAGC28CTTG; C6T, CT9TC, C17G, A29C; \hat{ }CA63, A88C; C2_, C9T, C17G, A36C; |
| | \hat{ }G64, \hat{ }G86; \hat{ }CGGCAGAT65, T67G, \hat{ }GC69, G70T, A72G, \hat{ }GCTC75, G77T, T79C, CGTAA81_; |
| | C73T, \hat{ }G74; T14G, T16A; \hat{ }AT14, A88C; G64C, A88T; C2_, A39T, \hat{ }A55; C2_, C15T; \hat{ }G70, C81T; |
| | \hat{ }A81, C81T; \hat{ }T72, A72T; C2_, C69T; T75G, T79G; A88_, A91C; \hat{ }T7, G7T; G7A, A29T, \hat{ }A77; |
| | CC8AT, C17G; C2_, T52C; G7A, C9T, TC16CG; G70A; C9T, C17G, AA87TC; \hat{ }A53, A91C; |
| | T3A, G5C, GC7CT, GA28AG, C31G, A33T; \hat{ }G70, \hat{ }C79, A88C; \hat{ }T72, \hat{ }G77; C9T, C17G, C69T; |
| | T-.3.CA, G7A, C9_, AG29GC, CA32TG; TGG.3.-AA, \hat{ }G9, \hat{ }CGC28, A29T, CCA31_; GCGC.62.-- |
| | AA, T67C, C69A, GA71AC, TC79GT, G82T, AAGA.84.---G, GC89TT; A85G, A87G; TG3_, C--.8.TCG, |
| | GAG28CGA, C32G; T66C, A85G; \hat{ }A16, G86T, A88T; TT74GG, G--.77.AAC; C2_, T79C; |
| | C9T, \hat{ }A13, C17G, \hat{ }G54; \hat{ }C63, G64T; C2_, T83C; \hat{ }C73, \hat{ }C73; -T.3.AA, |
| | G7_, A29_, A-.33.GT, G70A; \hat{ }T16, A91C; \hat{ }T64, \hat{ }G64; T79C; C9T, C17G, G77A; |
| | \hat{ }T64, \hat{ }T64; C2_, G71A; T14C, C17G; G7C, TC14CA, C17G; A85C, A88C; |
| | \hat{ }A3, GG4TC, C9_, GA28CG, CCA31AAT; --C.63.TTT, C65_, CGGA.69.T---, TCCG.79.--- |
| | A, G86C, G89A; C9T, C17G, \hat{ }C57; C15G, T16A; C9T, C17G, \hat{ }CA64; AG39TA, T52C, T54A; |
| | C2A, A87G |
| 1.4 to 1.5 | -C.15.GT, A36C; A29C, T83C; G7T, A27G; \hat{ }C29, \hat{ }C29; \hat{ }T80, \hat{ }C80; TGGC3ACAG, GA26_, -- |
| | A.33.TGG; A72G, \hat{ }T73; C9T, C17G, T66A, A85G; \hat{ }C15, \hat{ }G15; TG3_, -- |
| | C.8.GCT, GAG28CGC, C32G; \hat{ }T19; G28A, A29C; \hat{ }G70, \hat{ }G80; CT2_, A36C, A39C; |
| | C9T, C17G, \hat{ }CC79; \hat{ }G54, A68C, A72C; \hat{ }CT78, A88C; T74G, G78C; TTC74AGG, \hat{ }AT78; |
| | C9T, C17G, C76G; |
| | \hat{ }GGCAGCTCTGA64, T66C, A68C, GA71AG, \hat{ }C75, G77T, T79C, CGTAAGAA81_; \hat{ }A1, A68C; |
| | \hat{ }A4; A72G, G78C; T3G, C8T, GA28CC, A33C; G7C, -C.80.AT; C9T, C17G, A59T; G26C, C93G; |
| | G7C, T14A, \hat{ }T86, A91C; \hat{ }G64, \hat{ }T87, A88C; A1G, A29C; C9T, C17G, \hat{ }AT78; |
| | G28T, GCCA30TTTG; C2_, T75A, G78A; TG3GA, CG6AC, AG29GT, CA32TC; |
| | A36G, \hat{ }C57, A91C; \hat{ }C72, A72C; C9T, C17G, \hat{ }G82; A27T; |
| | TG3CC, CGC6TTG, G28C, G30A, CA32GG, C80G; \hat{ }A1, \hat{ }A53, A88C; A72C, C80A; G7T, C73G; |
| | \hat{ }A15, A87G; T14_, \hat{ }C29; G7A, T14_, A91C; C15T, T16A; C15T, C17G; C65_, A88_, A94C; \hat{ }A16; |
| | C9T, C17G, \hat{ }G54, A68C; -T.3.AC, G5A, C9_, GAG28CGT, CA32GG; \hat{ }T15, \hat{ }C15; |
| | C9T, T14A, C17G, T34C, \hat{ }G64, G86T; \hat{ }T71, C80G, A91C; -C.15.GT, A68C; \hat{ }G87, \hat{ }T87; |
| | C73_, G78_, A94C; C2G; G77C, T79A; G70C; A68G; \hat{ }T81, A91C; C9T, C17G, T79A; \hat{ }T72, \hat{ }T72 |
| 1.3 to 1.4 | T66A, A88C; C76G, G77T; A53G, A59C; CTG2_, G7T; A72_, \hat{ }T79; \hat{ }AA80, A88C; |
| | TGG3CAA, C8G, GA28CC, CCA31TGG; \hat{ }C78, \hat{ }T78; --G.28.TGA, T79C; \hat{ }T72, \hat{ }G77, A88C; |
| | A72G, \hat{ }C79; T3G, G5A, G7A, A29G, C31T, A33C; T14G, A21G; \hat{ }T2, A72C; G7T, T14G, \hat{ }CG64; |
| | T3G, G71A; G64A, A87G; T3C, C6T, AG29CC, A33G; T45A; G7A, C9T, T14A, C17G; |
| | TG3CT, CGC6TAT, GAG28ATA, CA32AG; C9T, C17G, \hat{ }T83; G7T, C9T, A53T; C9T, C17G, T75G; |
| | G7C, T14C, A72_; \hat{ }A65, A87G, \hat{ }C89; C9T, C17G, G70C, C81G; G7T, A59T; AG29CA, A72T, \hat{ }G77; |
| | T74C, G78A; C2A; C9T, C17G, C73T, T75G; \hat{ }G54, A72C; \hat{ }AA81, A88C; \hat{ }T54, A68C; |
| | C65A, G86A; \hat{ }A1, A72C; T3G, C9T, C17G; C2_, A33T; A87T; \hat{ }A65, \hat{ }T86; A53G; A85G, A87C; |
| | T3G, G5C, GC7TG, G28C, C31G, TC75_; -T.3.AC, G7A, C9_, GAG28TGC, CA32GG, G71T; |
| | G7C, C15A; G64A, A85G, A88_; \hat{ }A74; \hat{ }TG64, A88C; A29C, A60T; C9T, C17G, C80G; |
| | \hat{ }T64, \hat{ }A87; G7T, \hat{ }A59; G77C, G78C; A72C, \hat{ }T79; \hat{ }T73, \hat{ }C78, A88C; \hat{ }C29, A91C; \hat{ }A64, A88C; |
| | \hat{ }G54, T58A; TGGCG3CACTT, GCCA30AGTG; C9T, C17G, A21T; |
| | G4C, C8G, GA28AC, C32G, \hat{ }G82; A36C, A53G; C9T, C17G, G71T; C9T, CA17GT, T45A, G70C; |
| | \hat{ }A81; G7A, A72T; CT2_, T10G; G64T, A87G; \hat{ }G70, T79A; C2_, C9T, C17G, T52C; C2_, T45C; |
| | C9T, C17G, \hat{ }C35, A36G; G7T, T58A; \hat{ }A73, \hat{ }C73 |
| 1.2 to 1.3 | C2G, C73G; G7T, \hat{ }T14; T75C, C76T; \hat{ }A80, \hat{ }C80; A1_, A46C; C9T, C17_, A91C; |
| | C35G, \hat{ }C58, A68C; C2T, T3A; \hat{ }C29, A72C; T79G, C80A; G71A, C81_; G7T, G28T; CT2_, T45G; |
| | A29C, \hat{ }G92; C9T, C17G, T67C, A84G; T3C, \hat{ }T6, C9_, GAG28AGA, A33G; A36T; A85C, A88T; |
| | TG3GC, C6A, C8T, GAG28ACT, CA32GC; T10C, A29C; A1_, C2_; \hat{ }C65, A87T; A72T, C81T; |
| | C15A, T79A; \hat{ }GA1, G7A, C15A, C17G, A88C; \hat{ }A16, T16A; A29T, A60C; C76A, G78A; |
| | A29T, C31T; A29C, G86C; \hat{ }G70, T79G, A91C; \hat{ }T54, A72C; \hat{ }GAAC73, T74A, GG.77.C-; |
| | T14_, A29C, A46C; C9T, C17G, \hat{ }A72, \hat{ }A78; T14C, C15A; \hat{ }A17, \hat{ }G17; C9T, C17G, CG76AC; |
| | T74C, T79C; G7A, TC14AA, C17A; \hat{ }T64, \hat{ }A64; \hat{ }T81, \hat{ }A81; C2A, A36T; C9T, C17G, G82T; |
| | T74A, G77A; \hat{ }A1, A33C, A36C; G7C, TC14CT, T34A; A36T, A53G; \hat{ }A65, \hat{ }A84; A1_; G7T, \hat{ }T60; |
| | T3A, G5C, G7T, C31G, A33T, T52G, \hat{ }C54; T75G, G77T; G5C, G7A, A29T, C31T; |
| | TGGC3CCAG, C8T, GA26_, G30A, --A.33.TGG; C9T, \hat{ }C17; C2_, T14A, A91C; G77A, G78T; |
| | \hat{ }G64, G86A, A91C; T16A, C17G; C9T, C17G, T34A; A87G; A39G, -T.54.GC; A39G, -T.54.GC, |
| | A91C; \hat{ }A5, C6T, C9_, G28C, GC30CT; A72C, G77A; C2_, A91C, A94C; C2_, G7C; A84G; |
| | C73A, G78T; \hat{ }T78, \hat{ }A78; TGG3GTC, C8G, GA28AC, CCA31GAC; G7A, \hat{ }G14; C76T, G77A; |
| | C2_, G7T; G7A, T14A; \hat{ }A17, A68C, A72C; TGG3CCA, GC7CG, GA28CG, CCA31TGG; T79G; |
| | \hat{ }A72, \hat{ }C78; C15G, A29T, G57C, A59T; T14A, \hat{ }G74; G7T, C65T, A87C; C9T, C17G, G70T |

*mutated sequences are ‘;’-separated and multiple mutations per sequence are ‘,’-separated

### Example 29: The CcdB Selection Assay Identifies CasX Protein Variants with Improved dsDNA Cleavage or Improved Spacer Specificity at TTC, ATC, and CTC PAM Sequences

[1328] Experiments were conducted to identify the set of variants derived from CasX 515 (SEQ ID NO: 145) that were biochemically competent and that exhibit improved activity or improved spacer specificity compared to CasX 515 for double-stranded DNA (dsDNA) cleavage at target DNA sequences associated with a PAM sequence of either TTC or ATC or CTC. In order to accomplish this, first, a set of spacers was identified with survival above background levels in a CcdB selection experiment using CasX 515 and guide scaffold 174. Second, CcdB selections were performed with these spacers to determine the set of variants derived from CasX 515 that are biochemically competent for dsDNA cleavage at the canonical “wild-type” PAM sequence TTC. Third, CcdB selection experiments were performed to determine the set of variants of CasX 515 that enable improved dsDNA cleavage at either PAM sequences of type ATC or of type CTC. Fourth, plasmid counter-selection experiments were performed to determine the set of variants derived from CasX 515 that resulted in improved spacer specificity.

### Materials and Methods

[1329] For CcdB selection experiments, 300 ng of plasmid DNA (p73) expressing the indicated CasX protein (or library) and sgRNA was electroporated into E. coli strain BW25113 harboring a plasmid expressing the CcdB toxic protein. Cells were titered on plates containing either glucose (CcdB toxin is not expressed) or arabinose (CcdB toxin is expressed), and the relative survival was calculated and plotted, as shown in FIG. 103. The remainder of the recovered culture was split after the recovery period, and grown in media containing either glucose or arabinose, in order to collect samples of the pooled library either with no selection, or with strong selection, respectively. These cultures were harvested and the surviving plasmid pool was extracted using a Plasmid Miniprep Kit (QIAGEN®) according to the manufacturer's instructions. The entire process was repeated for a total of three rounds of selection.

[1330] The final plasmid pool was isolated and a PCR amplification of the p73 plasmid was performed using primers specific for unique molecular identifier (UMI). These UMI sequences had been designed such that each specific UMI is associated with one and only one single mutation of the CasX 515 protein. Typical PCR conditions were used for the amplification. The pool of variants of the CasX 515 contained many possible amino acid substitutions, as well as possible insertions, and single amino acid deletions in an approach termed Deep Mutational Evolution (DME). Amplified DNA product was purified with Ampure XP DNA cleanup kit. Amplicons were then prepared for sequencing with a second PCR to add adapter sequences compatible with next-generation sequencing (NGS) on either a MiSeq™ instrument or a NextSeq instrument (Illumina™) according to the manufacturer's instructions. NGS of the prepared samples was performed. Returned raw data files were processed as follows: (1) the sequences were trimmed for quality and for adapter sequences; (2) the sequences from read 1 and read 2 were merged into a single insert sequence; and (3) each sequence was quantified for containing a UMI associated with a mutation relative to the reference sequence for CasX 515. Incidences of individual mutations relative to CasX 515 were counted. Mutation counts post-selection were divided by mutation counts pre-selection, and a pseudocount of ten was used to generate an “enrichment score”. The log base two (log₂) of this score was calculated and plotted as heat maps in which the enrichment score for biological replicates for a single spacer was determined at each amino acid position for insertions, deletions, or substitutions (not shown). The library was passed through the CcdB selection with two TTC PAM spacers performed in triplicate (spacers 23.2 AGAGCGTGATATTACCCTGT, SEQ ID NO: 2924, and 23.13 CCCTTTGACGTTGGAGTCCA, SEQ ID NO: 2925) and one TTC PAM spacer performed in duplicate (spacer 23.11 TCCCCGATATGCACCACCGG, SEQ ID NO: 2926), and the mean of triplicate measurements was plotted on a log 2 enrichment scale as a heatmap for the measured variants of CasX 515. Variants of CasX 515 that retained full cleavage competence compared to CasX 515 exhibited log 2 enrichment values around zero; variants with loss of cleavage function exhibited log 2 values less than zero, while variants with improved cleavage using this selection resulted in log 2 values greater than zero compared to the values of CasX 515. Experiments to generate additional heat maps (not shown) were performed using the following single spacers (11.2 AAGTGGCTGCGTACCACACC, SEQ ID NO: 2927; 23.27 GTACATCCACAAACAGACGA, SEQ ID NO: 2928; and 23.19 CCGATATGCACCACCGGGTA, SEQ ID NO: 2929, respectively) for selectivity.

[1331] For plasmid counter-selection experiments, additional rounds of bacterial selection were performed on the final plasmid pool that resulted from CcdB selection with TTC PAM spacers. The overall scheme of the counter-selection is to allow replication of only those cells of E. coli which contain two populations of plasmids simultaneously. The first plasmid (p73) expresses a CasX protein (under inducible expression by ATc) and a sgRNA (constitutively expressed), as well as an antibiotic resistance gene (chloramphenicol). Note that this plasmid can also be used for standard forward selection assays, such as CcdB, and that the spacer sequence is completely free to vary as desired by the experimentalist. The second plasmid (p74) serves only to express an antibiotic resistance gene (kanamycin) but has been modified to contain (or not contain) target sites matching the spacer encoded in p73. Furthermore, these target sites can be designed to incorporate “mismatches” relative to the spacer sequence, consisting of non-canonical Watson-Crick base-pairing between the RNA of the spacer and the DNA of the target site. If the RNP expressed from p73 is able to cleave a target site in p74, the cell will remain only resistant to chloramphenicol. In contrast, if the RNP cannot cleave the target site, the cell will remain resistant to both chloramphenicol and kanamycin. Finally, the dual plasmid replication system described above can be achieved in two ways. In sequential methods, either plasmid can be delivered to a cell first, after which the strain is made electrocompetent and the second plasmid is delivered (both by electroporation). Previous work has shown that either order of plasmid delivery is sufficient for successful counter-selection, and both schemes were performed: in an experiment named “Screen 5”, p73 is electroporated into competent cells harboring p74, while in Screen 6 the inverse is true. Cultures were electroporated, recovered, titered, and grown under selective conditions as above for a single round, and plasmid recovery followed by amplification, NGS, and enrichment calculation were also performed as above.

[1332] Finally, additional CcdB selections were performed in a similar manner, but with guide scaffold 235 and with alternative promoters WGAN45, Ran2, and Ran4, all targeting the toxic CcdB plasmid with spacer 23.2. These promoters are expected to more weakly express the guide RNA compared to the above CcdB selections and are thus expected to reduce the total concentration of CasX RNP in a bacterial cell. This physiological effect should reduce the overall survival of bacterial cells in the selective assay, thus increasing the dynamic range of enrichment scores and correlating more precisely with RNP nuclease activity at the TTC PAM spacer 23.2. For each promoter, three rounds of selection were performed in triplicate as above, and each round of experimentation resulted in enrichment data as above. These experiments are hereafter referred to as Screen 7.

### Results:

[1333] The results of the library screen heat maps demonstrated that CasX 515 complexed with guide scaffold 174 was capable of cleaving the CcdB expression plasmid when targeted using spacers (listed below) that target DNA sequences associated with TTC PAM sequences. In contrast, spacers utilizing alternative PAM sequences exhibited far more variable survival. ATC PAM spacers (listed below) ranged in survival from a few percent to much less than 0.1%, while CTC PAM spacers (listed below) enabled survival in a range from >50% to less than 1%. Finally, GTC PAM spacers (listed below) only enabled survival at or below 0.1%. These benchmarking data support the experimental design of this selection pipeline and demonstrate the robust selective power of the CcdB bacterial assay. Specifically, CasX proteins unable to cleave double-stranded DNA are de-enriched by at least four orders of magnitude, while CasX proteins biochemically competent for cleavage will survive the assay.

[1334] Heatmaps were used to identify the set of variants of CasX 515 that were biochemically competent for dsDNA cleavage at target DNA sequences associated with a TTC PAM sequence, as well as those variants exhibiting improved for dsDNA cleavage at target DNA sequences associated with PAM sequences of CTC (spacers 11.2 and 23.27) and ATC (spacer (23.19).

[1335] These three datasets, either individually, or combined, represent underlying biochemical differences between variants and identify regions of interest for future engineering of improved CasX therapeutics for human genome editing. As evidence for this, internal controls were included uniformly as part of the na Ove library, such as the presence of a stop codon at each position throughout the protein. These stop codons were consistently observed to be lost throughout rounds of selection, consistent with the expectation that partially truncated CasX 515 should not enable dsDNA cleavage. Similarly, variants with a loss of activity reflected in the heatmap data were observed to have become depleted during the selection, and thus have a severe loss of fitness for double-stranded DNA cleavage in this assay. However, variants with an enrichment value of one or greater (and a corresponding log 2 enrichment value of zero or greater) are, at minimum, neutral with respect to biochemical cleavage. Importantly, if one or more of the mutations identified in this specific subset of variants exhibit desirable properties for a therapeutic molecule, these mutations establish a structure-function relationship shown to be compatible with biochemical function. More specifically, these mutations can affect properties such as CasX protein transcription, translation, folding, stability, ribonucleoprotein (RNP) formation, PAM recognition, double-stranded DNA unwinding, non-target strand cleavage, and target strand cleavage.

[1336] For those variants competent for cleavage at sequences associated with CTC and ATC PAM sequences, enriched variants in these datasets (enrichment >1, equivalent to log 2 enrichment for values of approximately 0) represent mutations that specifically improve cleavage of CTC or ATC PAM target sites. Mutations meeting these criteria can be further subcategorized in two general ways: either the mutation improves cleavage rates by improving the recognition of the PAM (Type 1) or the mutation improves the overall cleavage rate of the molecule regardless of the PAM sequence (Type 2).

[1337] As examples of the first type, substitution mutations at position 223 were found to be enriched by several hundred-fold in all samples tested. This location encodes a glycine in both wild-type reference CasX proteins CasX 1 and 2, which is measured to be 6.34 angstroms from the ˜4 nucleotide position of the DNA non-target strand in the published CryoEM structure of CasX 1 (PDB ID: 6NY2). These substitution mutations at position 223 are thus physically proximal to the altered nucleotide of the novel PAM, and likely interact directly with the DNA. Further supporting this conclusion, many of the enriched substitutions encoded amino acids which are capable of forming additional hydrogen bonds relative to the replaced amino acid (glycine). These findings demonstrate that improved recognition of novel PAM sequences can be achieved in the CasX protein by introducing mutations that interact with one or both of the DNA strands, especially when physically proximal to the PAM DNA sequence (within ten angstroms). Additional features of the heat maps for ATC and CTC spacers represented mutations enabling increased recognition of non-canonical PAM sequences, but their mechanism of action has not yet been investigated.

[1338] As examples for the second type of mutation, the results of the heat maps were used to identify mutations that improve the overall cleavage rate compared to CasX 515, but without necessarily specifically recognizing the PAM sequence of the DNA. For example, a variant of CasX 515 consisting of an insertion of arginine at position 27 was measured to have an enrichment value greater than one in the selection with spacer 11.2 (CTC PAM) and spacer 23.19 (ATC PAM). This variant had previously been identified by a comparable selection on a CTC PAM spacer, where this mutation was enriched by orders of magnitude (data not shown). The position of this amino acid mutation is physically proximal (9.29 angstroms) to the DNA target strand at position −1 in the above structural model. These insights suggest a mechanism where the mature R-loop formed by CasX RNP with double-stranded DNA is stabilized by the side chain of the arginine, perhaps by ionic interactions of the positively charged side chain with the negatively charged backbone of the DNA target strand. Such an interaction is beneficial to overall cleavage kinetics without altering the PAM specificity. These data support the conclusion that some enriched mutations represent variants that improve the overall cleavage activity of CasX 515 by physically interacting with either or both of the DNA strands when physically proximal to them (within ten angstroms).

[1339] The data support the conclusion that many of the mutations measured to improve cleavage at sequences associated with the CTC or ATC PAM sequences identified from the heat maps can be classified as either of the two types of mutations specified above. For mutations of type one, variants consisting of mutations to position 223 with a large enrichment score in at least one of the spacers tested at CTC PAMs are listed in Table 49, with the associated maximum enrichment score. For mutations of type two, a smaller list of mutations was chosen systematically from among the thousands of enriched variants. To identify those mutations highly likely to improve the overall cleavage activity compared to CasX 515, the following approach was taken. First, mutations were filtered for those which were most consistently enriched across CTC or ATM PAM spacers. A lower bound (LB) was defined for the enrichment score of each mutation for each spacer. LB was defined as the combined log 2 enrichment score across biological triplicates, minus the standard deviation of the log 2 enrichment scores for the individual replicates. Second, the subset of these mutations was taken in which LB>1 for at least two out of three independent experimental datasets (one ATC PAM selection and two CTC PAM selections). Third, this subset of mutations was further reduced by excluding those for which a negative log 2 enrichment was measured in any of the three TTC PAM selections. Finally, individual mutations were manually selected based on a combination of structural features and strong enrichment score in at least one experiment. The resulting 274 mutations meeting these criteria are listed in Table 50, along with the maximum observed log 2 enrichment score from the two CTC or one ATC PAM experiments represented in the resulting heat maps, as well as the domain in which the mutation is located.

[1340] In contrast to Class I mutations, there exists another category of mutations that improve the ability of the CasX RNP to discriminate between on-target and off-target sites in genomic DNA, as determined by the spacer sequence, termed Class II, which improve the spacer specificity of the nuclease activity of the CasX protein. Two additional experiments were performed to specifically identify Class II mutations, where these experiments consisted of plasmid counter-selections and resulted in enrichment scores representing the sensitivity of the generated variant, compared to CasX 515, to a single mismatch between the spacer sequence of the guide RNA and the intended target DNA. The resulting enrichment scores were ranked for all observed mutations across the experimental data, and the following analyses were performed to identify a subset of mutations likely to improve the spacer specificity of the CasX protein without substantially reducing the nuclease activity at the desired on-target site. First, mutations from Screen 5 were ranked by their average enrichment score across three technical replicates using Spacer 23.2. Those mutations which were physically proximal to the nucleotide mismatch, as inferred from published models of the CasX RNP bound to a target site (PDB ID: 6NY2), were removed in order to discard those Class II mutations that might only confer improvements to specificity at Spacer 23.2 only, rather than universally across spacers. Finally, these Class II mutations were discarded if their cleavage activity at on-target TTC PAM sites was negatively impacted by the mutation if their average log 2 enrichment from the three TTC PAM CcdB selections was less than zero. The resulting mutations meeting these criteria are listed in Table 51, along with the maximum observed log₂ enrichment score from Screen 5 and the domain in which the mutation is located. Additionally, Class II mutations were identified from the counter-selection experiment Screen 6. These mutations were similarly ranked by their mean enrichment scores, but different filtering steps were applied. In particular, mutations were identified from each of the following categories: those with the highest mean enrichment scores from either Spacer 23.2, Spacer 23.11, or Spacer 23.13; those with the highest combined mean enrichment scores from Spacer 23.2 and Spacer 23.11; those with the highest combined mean enrichment scores from Spacer 23.11 and Spacer 23.13; or those with the highest combined mean enrichment scores from Spacer 23.2 in Screen 5 and Spacer 23.2 in Screen 6. These resulting mutations are listed in Table 51, along with the maximum observed log 2 enrichment score from Screen 6 and the domain in which the mutation is located.

[1341] In addition to the Class I or Class II mutations, there exists another category of mutations that has been directly observed to improve the dsDNA editing activity at TTC PAM sequences. These mutations, termed Class III mutations, demonstrated improved nuclease activity by way of exhibiting enrichment scores above that of CasX 515 when targeting the CcdB plasmid using Spacer 23.2 in Screen 7. A computational filtering step was used to identify a subset of these enriched mutations which are of particular interest. Specifically, mutations were identified that had an average enrichment value across three replicates that was greater than zero for each of the three promoters tested. Finally, features of the enrichment scores across the amino acid sequence were used to identify additional mutations at enriched positions. Example features of interest included the following: insertions or deletions at the junction of protein domains in order to facilitate topological changes; substitutions of an amino acid for proline in order to kink the polypeptide backbone; substitutions of an amino acid for a positively charged amino acid in order to add ionic bonding between the protein and the negatively charged nucleic acid backbone of either the guide RNA or either strand of the target DNA; deletions of an amino acid where consecutive deletions are both highly enriched; substitutions to a position that contains many highly enriched substitutions; substitutions of an amino acid for a highly enriched amino acid at the extreme N-terminus of the protein. These resulting mutations are listed in Table 52, along with the maximum observed log 2 enrichment score from Screen 6 and the domain in which the mutation is located.

TABLE 49
Mutations to CasX 515 (SEQ ID NO: 145) that improve
cleavage activity at CTC PAM sequences by physically
interacting with the PAM nucleotides of the DNA

| | | | Maximum observed | |
|---|---|---|---|---|
| | | | log₂ enrichment | |
| Position | Reference | Alternate | in Ccdb selections | Domain |
| 223 | G | Y | 4.6 | helical I-II |
| 223 | G | N | 5.7 | helical I-II |
| 223 | G | H | 4.2 | helical I-II |
| 223 | G | S | 4.6 | helical I-II |
| 223 | G | T | 3.8 | helical I-II |
| 223 | G | A | 6.3 | helical I-II |
| 223 | G | V | 3.6 | helical I-II |

TABLE 50
Mutations to CasX 515 systematically identified from all datasets
to improve cleavage activity at ATC and CTC PAM sequences

| | | | Maximum observed | |
|---|---|---|---|---|
| | | | log₂ enrichment | |
| Position | Reference | Alternate | in CcdB selections | Domain |
| 3 | — | G | 3.0 | OBD-I |
| 3 | I | G | 3.5 | OBD-I |
| 3 | I | E | 4.5 | OBD-I |
| 4 | — | G | 2.5 | OBD-I |
| 4 | K | G | 2.5 | OBD-I |
| 4 | K | P | 3.1 | OBD-I |
| 4 | K | S | 3.3 | OBD-I |
| 4 | K | W | 2.8 | OBD-I |
| 5 | — | P | 3.5 | OBD-I |
| 5 | — | G | 3.1 | OBD-I |
| 5 | R | S | 3.7 | OBD-I |
| 5 | — | S | 2.2 | OBD-I |
| 5 | R | A | 3.2 | OBD-I |
| 5 | R | P | 3.6 | OBD-I |
| 5 | R | G | 3.2 | OBD-I |
| 5 | R | L | 2.7 | OBD-I |
| 6 | I | A | 3.3 | OBD-I |
| 6 | — | G | 3.7 | OBD-I |
| 7 | N | Q | 3.1 | OBD-I |
| 7 | N | L | 2.7 | OBD-I |
| 7 | N | S | 3.7 | OBD-I |
| 8 | K | G | 3.3 | OBD-I |
| 15 | K | F | 3.0 | OBD-I |
| 16 | D | W | 2.8 | OBD-I |
| 16 | — | F | 4.2 | OBD-I |
| 18 | — | F | 3.5 | OBD-I |
| 28 | M | H | 2.5 | OBD-I |
| 33 | V | T | 2.0 | OBD-I |
| 34 | R | P | 3.6 | OBD-I |
| 36 | M | Y | 2.4 | OBD-I |
| 41 | R | P | 2.2 | OBD-I |
| 47 | L | P | 2.2 | OBD-I |
| 52 | E | P | 3.2 | OBD-I |
| 55 | — | P | 2.7 | OBD-I |
| 55 | PQ | — | 3.0 | OBD-I |
| 56 | Q | S | 1.9 | OBD-I |
| 56 | — | D | 2.5 | OBD-I |
| 56 | — | T | 2.8 | OBD-I |
| 56 | Q | P | 3.9 | OBD-I |
| 58 | — | A | 2.2 | helical I-I |
| 63 | R | S | 3.0 | helical I-I |
| 63 | R | Q | 2.7 | helical I-I |
| 72 | D | E | 2.7 | helical I-I |
| 81 | L | V | 2.8 | helical I-I |
| 81 | L | T | 2.7 | helical I-I |
| 85 | W | G | 3.2 | helical I-I |
| 85 | W | F | 2.7 | helical I-I |
| 85 | W | E | 2.9 | helical I-I |
| 85 | W | D | 3.1 | helical I-I |
| 85 | W | A | 2.8 | helical I-I |
| 85 | W | Q | 3.0 | helical I-I |
| 85 | W | R | 3.7 | helical I-I |
| 88 | F | M | 2.4 | helical I-I |
| 89 | Q | D | 2.5 | helical I-I |
| 93 | V | L | 1.9 | helical I-I |
| 109 | Q | P | 1.8 | NTSB |
| 115 | E | S | 1.8 | NTSB |
| 120 | G | D | 2.4 | NTSB |
| 133 | G | T | 2.2 | NTSB |
| 141 | L | A | 2.2 | NTSB |
| 168 | L | K | 3.1 | NTSB |
| 170 | A | Y | 2.7 | NTSB |
| 170 | A | S | 1.7 | NTSB |
| 175 | E | A | 2.0 | NTSB |
| 175 | E | D | 2.8 | NTSB |
| 175 | E | P | 3.8 | NTSB |
| 223 | G | — | 1.4 | helical I-II |
| 223 | G | S | 8.8 | helical I-II |
| 223 | G | T | 3.7 | helical I-II |
| 242 | S | T | 1.9 | helical I-II |
| 247 | I | T | 1.8 | helical I-II |
| 254 | V | T | 2.5 | helical I-II |
| 265 | L | Y | 1.9 | helical I-II |
| 288 | K | G | 4.2 | helical I-II |
| 288 | K | S | 4.0 | helical I-II |
| 291 | V | L | 2.6 | helical I-II |
| 303 | M | T | 2.3 | helical I-II |
| 303 | M | W | 2.7 | helical I-II |
| 328 | G | N | 3.3 | helical I-II |
| 331 | S | Q | 2.7 | helical I-II |
| 334 | — | A | 2.3 | helical II |
| 334 | LV | — | 3.0 | helical II |
| 335 | V | E | 2.8 | helical II |
| 335 | V | Q | 2.7 | helical II |
| 335 | V | F | 2.5 | helical II |
| 335 | V | — | 3.2 | helical II |
| 336 | E | P | 2.9 | helical II |
| 336 | E | — | 3.1 | helical II |
| 336 | E | D | 2.7 | helical II |
| 336 | E | L | 2.4 | helical II |
| 336 | E | R | 2.7 | helical II |
| 337 | R | N | 2.5 | helical II |
| 338 | Q | V | 2.5 | helical II |
| 338 | — | Q | 3.0 | helical II |
| 339 | — | G | 2.6 | helical II |
| 341 | — | H | 2.9 | helical II |
| 341 | — | A | 2.0 | helical II |
| 342 | V | D | 2.7 | helical II |
| 342 | — | T | 2.3 | helical II |
| 342 | V | — | 3.0 | helical II |
| 342 | — | F | 2.5 | helical II |
| 343 | — | D | 3.3 | helical II |
| 343 | D | — | 2.0 | helical II |
| 344 | W | — | 3.1 | helical II |
| 344 | W | T | 2.8 | helical II |
| 344 | W | H | 2.8 | helical II |
| 344 | — | P | 3.0 | helical II |
| 344 | — | G | 2.6 | helical II |
| 345 | — | R | 3.2 | helical II |
| 345 | W | P | 3.1 | helical II |
| 345 | W | D | 2.3 | helical II |
| 345 | — | D | 2.9 | helical II |
| 345 | W | L | 2.3 | helical II |
| 346 | — | P | 2.4 | helical II |
| 346 | — | D | 2.9 | helical II |
| 347 | M | — | 2.6 | helical II |
| 348 | — | T | 3.3 | helical II |
| 350 | N | I | 2.3 | helical II |
| 351 | V | N | 2.8 | helical II |
| 351 | V | H | 3.1 | helical II |
| 352 | K | D | 2.2 | helical II |
| 354 | L | D | 3.1 | helical II |
| 355 | I | S | 2.6 | helical II |
| 357 | E | C | 2.1 | helical II |
| 357 | E | P | 2.8 | helical II |
| 358 | K | T | 2.8 | helical II |
| 359 | K | E | 2.7 | helical II |
| 363 | K | L | 3.3 | helical II |
| 363 | K | Y | 2.2 | helical II |
| 367 | Q | D | 2.8 | helical II |
| 367 | Q | P | 3.0 | helical II |
| 369 | — | S | 2.6 | helical II |
| 369 | LA | — | 2.4 | helical II |
| 373 | K | L | 2.2 | helical II |
| 374 | — | R | 2.0 | helical II |
| 397 | Y | T | 2.5 | helical II |
| 400 | G | M | 2.0 | helical II |
| 402 | L | V | 2.4 | helical II |
| 403 | L | C | 2.3 | helical II |
| 404 | L | D | 2.5 | helical II |
| 404 | L | N | 2.5 | helical II |
| 404 | L | W | 2.3 | helical II |
| 404 | L | Y | 2.1 | helical II |
| 407 | E | F | 2.6 | helical II |
| 407 | E | L | 2.2 | helical II |
| 407 | E | Y | 2.6 | helical II |
| 411 | G | P | 2.6 | helical II |
| 411 | — | E | 3.2 | helical II |
| 413 | — | T | 2.7 | helical II |
| 413 | — | R | 2.4 | helical II |
| 413 | — | W | 3.0 | helical II |
| 413 | — | Y | 3.7 | helical II |
| 414 | — | W | 2.6 | helical II |
| 414 | — | Y | 3.1 | helical II |
| 414 | W | G | 3.0 | helical II |
| 414 | W | R | 2.6 | helical II |
| 416 | K | D | 2.7 | helical II |
| 416 | K | H | 2.0 | helical II |
| 416 | K | P | 2.6 | helical II |
| 416 | K | T | 2.3 | helical II |
| 417 | V | L | 2.6 | helical II |
| 417 | V | A | 2.5 | helical II |
| 418 | Y | C | 2.7 | helical II |
| 419 | D | G | 3.2 | helical II |
| 419 | D | M | 2.4 | helical II |
| 419 | D | P | 2.4 | helical II |
| 425 | I | C | 2.2 | helical II |
| 427 | K | T | 2.4 | helical II |
| 428 | K | R | 2.5 | helical II |
| 430 | E | G | 1.9 | helical II |
| 432 | L | A | 1.9 | helical II |
| 434 | K | H | 2.2 | helical II |
| 436 | I | T | 2.4 | helical II |
| 436 | I | S | 3.0 | helical II |
| 436 | I | Q | 2.7 | helical II |
| 437 | K | D | 3.1 | helical II |
| 442 | R | D | 2.5 | helical II |
| 442 | R | — | 2.7 | helical II |
| 446 | D | E | 2.3 | helical II |
| 446 | — | D | 2.3 | helical II |
| 450 | K | P | 2.3 | helical II |
| 452 | A | R | 2.0 | helical II |
| 453 | L | T | 3.2 | helical II |
| 456 | W | L | 2.2 | helical II |
| 457 | L | C | 2.2 | helical II |
| 459 | A | L | 2.0 | helical II |
| 461 | A | T | 2.7 | helical II |
| 461 | A | K | 2.1 | helical II |
| 465 | I | E | 3.1 | helical II |
| 465 | — | C | 2.9 | helical II |
| 466 | — | S | 3.5 | helical II |
| 466 | — | G | 2.5 | helical II |
| 467 | — | R | 2.4 | helical II |
| 467 | G | P | 2.0 | helical II |
| 468 | L | K | 3.6 | helical II |
| 468 | L | D | 3.2 | helical II |
| 468 | L | S | 3.0 | helical II |
| 468 | L | H | 3.3 | helical II |
| 470 | E | — | 2.4 | helical II |
| 472 | D | R | 2.2 | helical II |
| 472 | — | D | 2.4 | helical II |
| 473 | — | P | 2.6 | helical II |
| 474 | — | D | 2.7 | helical II |
| 475 | EF | — | 2.8 | helical II |
| 475 | — | Q | 2.7 | helical II |
| 476 | F | K | 2.8 | helical II |
| 476 | F | — | 2.2 | helical II |
| 477 | — | G | 2.8 | helical II |
| 479 | C | D | 3.1 | helical II |
| 480 | — | V | 2.2 | helical II |
| 480 | E | D | 2.3 | helical II |
| 481 | — | H | 2.2 | helical II |
| 481 | L | R | 2.9 | helical II |
| 482 | K | R | 2.1 | helical II |
| 483 | L | H | 2.7 | helical II |
| 484 | Q | C | 2.1 | helical II |
| 485 | K | P | 3.0 | helical II |
| 490 | L | S | 2.8 | helical II |
| 498 | E | L | 2.1 | helical II |
| 499 | — | F | 1.6 | helical II |
| 511 | K | T | 6.8 | OBD-II |
| 524 | — | P | 2.4 | OBD-II |
| 553 | — | S | 2.4 | OBD-II |
| 558 | — | R | 1.9 | OBD-II |
| 570 | M | T | 2.7 | OBD-II |
| 582 | I | T | 1.9 | OBD-II |
| 592 | Q | I | 2.1 | OBD-II |
| 592 | Q | F | 2.8 | OBD-II |
| 592 | Q | V | 2.0 | OBD-II |
| 592 | Q | A | 2.9 | OBD-II |
| 641 | — | R | 2.3 | OBD-II |
| 643 | — | D | 2.7 | OBD-II |
| 644 | — | W | 2.5 | OBD-II |
| 645 | — | A | 2.4 | OBD-II |
| 650 | — | I | 2.5 | RuvC-I |
| 651 | — | S | 2.4 | RuvC-I |
| 652 | — | T | 2.4 | RuvC-I |
| 652 | — | N | 2.3 | RuvC-I |
| 653 | — | R | 2.3 | RuvC-I |
| 653 | — | K | 2.2 | RuvC-I |
| 654 | — | H | 2.2 | RuvC-I |
| 654 | — | S | 2.3 | RuvC-I |
| 658 | V | L | 1.9 | RuvC-I |
| 695 | G | W | 1.4 | RuvC-I |
| 695 | G | R | 3.5 | RuvC-I |
| 708 | K | S | 3.0 | RuvC-I |
| 708 | K | T | 2.9 | RuvC-I |
| 708 | K | E | 3.1 | RuvC-I |
| 711 | V | A | 1.6 | RuvC-I |
| 726 | K | E | 2.0 | RuvC-I |
| 729 | N | G | 2.8 | RuvC-I |
| 736 | R | H | 2.7 | RuvC-I |
| 736 | R | G | 2.4 | RuvC-I |
| 771 | M | S | 3.7 | RuvC-I |
| 771 | M | A | 3.3 | RuvC-I |
| 792 | L | F | 2.5 | RuvC-I |
| 868 | V | D | 1.9 | TSL |
| 877 | — | A | 2.0 | TSL |
| 886 | T | E | 1.8 | TSL |
| 886 | T | D | 2.5 | TSL |
| 886 | T | N | 1.6 | TSL |
| 888 | G | D | 2.5 | TSL |
| 890 | S | — | 3.0 | TSL |
| 891 | G | — | 2.7 | TSL |
| 892 | — | E | 2.0 | TSL |
| 892 | — | N | 2.9 | TSL |
| 895 | S | I | 1.7 | TSL |
| 908 | E | D | 1.7 | TSL |
| 932 | S | M | 2.5 | RuvC-II |
| 932 | S | V | 2.6 | RuvC-II |
| 944 | — | L | 1.4 | RuvC-II |
| 947 | — | G | 1.9 | RuvC-II |
| 949 | T | — | 1.9 | RuvC-II |
| 951 | G | I | 3.7 | RuvC-II |

TABLE 51
Mutations to CasX 515 systematically identified
from all datasets to improve spacer specificity

| | | | Maximum observed | |
|---|---|---|---|---|
| | | | log₂ enrichment | |
| Position | Reference | Alternate | in counter-selections | Domain |
| 6 | I | L | 2.25 | OBD-I |
| 48 | — | P | 2 | OBD-I |
| 87 | — | G | 3.96 | helical I-I |
| 90 | K | V | 4.84 | helical I-I |
| 155 | F | V | 2.13 | NTSB |
| 215 | — | T | 2.03 | helical I-II |
| 216 | — | C | 3.03 | helical I-II |
| 220 | Y | F | 2.1 | helical I-II |
| 264 | S | H | 3.16 | helical I-II |
| 329 | — | Q | 2.71 | helical I-II |
| 343 | D | S | 2.69 | helical II |
| 346 | DM | — | 2.96 | helical II |
| 349 | — | P | 2.06 | helical II |
| 357 | — | G | 2.11 | helical II |
| 375 | QE | — | 2.34 | helical II |
| 378 | L | N | 2.38 | helical II |
| 389 | K | Q | 2.29 | helical II |
| 417 | — | L | 2.75 | helical II |
| 441 | E | L | 2.36 | helical II |
| 458 | R | D | 2.2 | helical II |
| 459 | A | E | 2.65 | helical II |
| 476 | FC | — | 2.34 | helical II |
| 503 | IL | — | 2.15 | OBD-II |
| 537 | K | G | 2.85 | OBD-II |
| 621 | L | T | 2.45 | OBD-II |
| 624 | — | A | 3 | OBD-II |
| 783 | L | Y | 2.08 | RuvC-I |
| 783 | — | P | 2.6 | RuvC-I |
| 787 | L | — | 2.49 | RuvC-I |
| 787 | L | R | 3.58 | RuvC-I |
| 787 | L | D | 5.58 | RuvC-I |
| 788 | — | Q | 2.65 | RuvC-I |
| 789 | — | R | 2.5 | RuvC-I |
| 789 | — | N | 2.71 | RuvC-I |
| 790 | E | N | 2.45 | RuvC-I |
| 792 | — | P | 2.85 | RuvC-I |
| 793 | P | A | 2.93 | RuvC-I |
| 795 | K | Q | 2.45 | RuvC-I |
| 796 | T | V | 2.75 | RuvC-I |
| 798 | — | R | 4.07 | RuvC-I |
| 799 | — | H | 2.79 | RuvC-I |
| 801 | T | Q | 3.16 | RuvC-I |
| 801 | — | H | 3.34 | RuvC-I |
| 801 | — | R | 2.86 | RuvC-I |
| 802 | — | L | 2.88 | RuvC-I |
| 802 | L | — | 2.87 | RuvC-I |
| 802 | — | W | 3.08 | RuvC-I |
| 803 | — | A | 3.19 | RuvC-I |
| 803 | — | F | 3.14 | RuvC-I |
| 803 | A | S | 5.79 | RuvC-I |
| 804 | Q | K | 3.05 | RuvC-I |
| 805 | Y | — | 3.29 | RuvC-I |
| 806 | T | Y | 3.07 | RuvC-I |
| 806 | T | F | 2.49 | RuvC-I |
| 807 | — | I | 3.21 | RuvC-I |
| 807 | S | P | 2.61 | RuvC-I |
| 809 | T | P | 3.2 | RuvC-I |
| 809 | — | N | 3.1 | RuvC-I |
| 810 | C | K | 3.19 | RuvC-I |
| 810 | C | M | 3.08 | RuvC-I |
| 811 | — | M | 2.51 | TSL |
| 812 | N | — | 3.07 | TSL |
| 812 | — | V | 2.68 | TSL |
| 813 | C | S | 2.3 | TSL |
| 814 | — | G | 3.15 | TSL |
| 814 | — | W | 3.04 | TSL |
| 815 | F | P | 3.09 | TSL |
| 817 | — | W | 2.87 | TSL |
| 828 | K | G | 1.99 | TSL |
| 906 | V | C | 2.01 | TSL |

TABLE 52
Mutations to CasX 515 (SEQ ID NO: 145) systematically
identified from all datasets to improve cleavage
activity at TTC PAM sequences

| | | | Maximum observed | |
|---|---|---|---|---|
| | | | log₂ enrichment | |
| Position | Reference | Alternate | in Ccdb selections | Domain |
| 4 | K | W | 3.51 | OBD-I |
| 5 | R | P | 4.01 | OBD-I |
| 27 | — | P | 4.69 | OBD-I |
| 28 | M | P | 3.69 | OBD-I |
| 56 | Q | P | 3.78 | OBD-I |
| 85 | W | A | 3.96 | helical I-I |
| 102 | — | G | 4.75 | NTSB |
| 104 | — | I | 4.43 | NTSB |
| 104 | — | L | 4.52 | NTSB |
| 130 | S | — | 4.02 | NTSB |
| 151 | Y | T | 3.46 | NTSB |
| 168 | L | D | 3.32 | NTSB |
| 168 | L | E | 4.08 | NTSB |
| 188 | K | Q | 4.96 | NTSB |
| 190 | G | Q | 4.1 | NTSB |
| 223 | G | — | 1.63 | helical I-II |
| 235 | G | L | 4.64 | helical I-II |
| 235 | G | H | 4.97 | helical I-II |
| 239 | S | H | 3.93 | helical I-II |
| 239 | S | T | 4.97 | helical I-II |
| 245 | Q | H | 5 | helical I-II |
| 288 | K | D | 5.08 | helical I-II |
| 288 | K | E | 4.79 | helical I-II |
| 303 | M | R | 3.71 | helical I-II |
| 303 | M | K | 3.29 | helical I-II |
| 307 | L | K | 3.55 | helical I-II |
| 328 | G | R | 3.91 | helical I-II |
| 328 | G | K | 4.58 | helical I-II |
| 334 | — | H | 5.65 | helical II |
| 335 | — | D | 5.5 | helical II |
| 335 | V | P | 5.1 | helical II |
| 345 | — | Q | 5.22 | helical II |
| 441 | — | K | 5.07 | helical II |
| 477 | C | R | 2.94 | helical II |
| 477 | C | K | 3.49 | helical II |
| 502 | S | — | 4.04 | OBD-II |
| 503 | I | R | 3.72 | OBD-II |
| 503 | I | K | Not detected | OBD-II |
| 504 | L | — | 4.24 | OBD-II |
| 542 | R | E | 4.54 | OBD-II |
| 563 | K | — | 3.25 | OBD-II |
| 593 | — | A | 1.83 | OBD-II |
| 610 | K | Q | 3.46 | OBD-II |
| 615 | R | Q | 3.67 | OBD-II |
| 643 | — | A | 2.42 | OBD-II |
| 697 | S | R | 2.67 | RuvC-I |
| 697 | S | K | 2.55 | RuvC-I |
| 906 | V | T | 4.65 | TSL |

### Example 30: Use of Muscle-Specific Promoters to Drive CasX Expression Results in Editing Activity in Muscle Cells and Tissue when the CasX:gRNA System is Expressed from a Transfected AAV Plasmid In Vitro or Packaged and Delivered Via AAVs In Vitro and In Vivo

[1342] Experiments were performed to demonstrate that use of muscle-specific promoters to drive CasX expression in an AAV vector results in higher and more selective editing activity in muscle cells than in non-muscle cell types, when the CasX:gRNA system is expressed from an AAV plasmid transfected in vitro. Experiments were also performed to demonstrate that use of muscle-specific promoters to drive CasX expression results in editing at a target locus in muscle cells when the CasX:gRNA system is packaged and delivered via AAVs in vitro and in vivo.

### Materials and Methods

[1343] CasX variant 491 and guide scaffold variant 235 were used in these experiments. AAV construct cloning was performed as similarly described in Example 1. Briefly, AAV constructs containing a muscle-specific promoter driving CasX expression and a Pol III U6 promoter driving the expression of gRNA scaffold 235 and a ROSA26-targeting spacer (spacer 35.2; refer to Table 53 for sequences) were generated using standard molecular cloning techniques. Sequence-validated plasmid constructs were midi-prepped for subsequent nucleofection.

TABLE 53
Sequences of AAV constructs used in this example
for testing muscle-specific promoters.

| | | DNA SEQ |
|---|---|---|
| Construct ID | Component Name | ID NO: |
| 215 through 220 | 5′ ITR | 423 |
| | buffer sequence | 788 |
| 215, 220 | UbC promoter | 464 |
| 216 | CK8e promoter | 4051 |
| 217 | MHCK7 promoter | 4052 |
| 218 | Desmin promoter | 4053 |
| 219 | MHCK promoter | 4054 |
| 215 through 220 | buffer sequence | 789 |
| | Kozak | NA |
| | start codon | NA |
| | cMyc NLS | 838 |
| | linker | NA |
| | CasX 491 | 791 |
| | linker | NA |
| | cMyc NLS | 839 |
| | stop codon | NA |
| | buffer sequence | 794 |
| | bGH poly(A) | 514 |
| | buffer sequence | NA |
| | U6 promoter | 661 |
| | buffer sequence | NA |
| | Scaffold 235 | 698 |
| 215 through 219 | Spacer 35.2 | 2920 |
| 220 | Spacer NT | 537 |
| 215 through 220 | buffer sequence | 796 |
| | 3′ ITR | 424 |

* Components are listed in a 5′ to 3′ order within the constructs

Plasmid Nucleofection into Mouse NPCs and Mouse C2C12 Myoblasts:

[1344] Briefly, 1 pig of individual AAV plasmids (Table 53) expressing the CasX under the control of different muscle promoters were nucleofected into mouse muscle C2C12 myoblast cells, as well as neuronal NPCs for each experimental condition using methods as described in Example 1. Full media replacement was performed 48 hours post-nucleofections. Five days post-nucleofection, treated cells were harvested for gDNA extraction using the Zymo Quick DNA™ 96 Kit following the manufacturer's instructions. Target amplicons were then amplified from 200 ng of extracted gDNA with a set of primers targeting the mouse ROSA26 locus and processed as described earlier in Example 23 for editing assessment by NGS. As experimental controls, AAV plasmid constructs encoding the following were also tested: 1) UbC promoter driving CasX expression with gRNA containing spacer 35.2; and 2) UbC promoter driving CasX expression with a non-targeting gRNA. A ‘no treatment’ control was also included as an experimental control.

[1345] AAV production and AAV titering were performed as described in Example 1.

### AAV Transduction of C2C12 Myoblasts and Myotubes:

[1346] AAVs were used to transduce two differentiated states of C2C12 cells—myoblasts and myotubes.

[1347] To determine the level of CasX-mediated editing in myoblasts, ˜5,000 C2C12 myoblasts were plated and transduced the next day with AAVs encoding the various CasX:gRNA systems (Table 53) at varying MOIs. Five days following transduction, cells were harvested for gDNA extraction for editing analysis at the ROSA26 locus as described above.

[1348] To determine the level of CasX-mediated editing in myotubes, ˜10,000 C2C12 myoblasts were plated and cultured in differentiation media for seven days to induce differentiation into myotubes. After myotube formation, cells were transduced with AAVs encoding the various CasX:gRNA systems (Table 53) at varying MOIs. Five days following transduction, cells were harvested for gDNA extraction for editing analysis at the ROSA26 locus as described above.

### In Vivo Administration of AAVs and Tissue Processing:

[1349] ˜8E11 AAV viral particles encoding the various CasX:gRNA systems (Table 53) were administered retro-orbitally in C57BL/6J adults. Naïve, untreated mice served as experimental controls. Mice were euthanized at four weeks post-injection. Various tissues were harvested for gDNA extraction using the Zymo Quick DNA/RNA™ miniprep Kit following the manufacturer's instructions. Tissues harvested were skeletal muscles (i.e., tibialis anterior (TA), gastrocnemius (GA), quadriceps (Quad), heart, and diaphragm (DIA)) and non-muscle organs (i.e., liver and lung). Target amplicons were amplified from 200 ng of extracted gDNA with a set of primers targeting the mouse ROSA26 locus and processed as described in Example 18 for editing assessment by NGS. The number of AAV viral genomes (vg) per diploid genome (dg) was determined in the harvested gDNA samples by droplet digital PCR (ddPCR) using the Bio-Rad QX200 Droplet Digital PCR instrument according to standard methods and following the manufacturer's guidelines (see additional detail in Example 34). The vg/dg analysis is an indication of the amount of AAV viral particles delivered into that specific tissue.

### Results:

[1350] AAV plasmids containing constructs encoding for muscle-specific promoters used to drive CasX expression were nucleofected into C2C12 myoblasts and mouse NPCs to assess the level of specificity of the editing activity in muscle cells compared to neuroprogenitor cells. FIG. 108 shows the quantification of editing measured as indel rate detected by NGS at the mouse ROSA26 locus in C2C12 cells and mouse NPCs for the indicated AAV plasmids. Of the four muscle-specific promoters assessed, use of promoters CK8e (construct ID 216), MHCK7 (construct ID 217), and MHCK (construct ID 219) resulted in higher CasX-mediated editing activity in C2C12 muscle cells compared to that seen in mouse NPCs. Specifically, use of the CK8e promoter resulted in-60% editing at the ROSA26 locus in myoblasts but ˜20% editing in mNPCs, indicating that use of the CK8e promoter would result in more selective expression and higher activity in muscle cell types than neuronal cell types (FIG. 108). Meanwhile, use of the Desmin promoter (construct ID 218) resulted in similar editing levels in both C2C12 cells and mouse NPCs, suggesting minimal tissue-specificity effects when utilizing the Desmin promoter. As anticipated, use of the ubiquitous UbC promoter resulted in similar levels of editing activity in both cell types, while no editing was observed with use of the non-targeting spacer or in the ‘no treatment’ control (FIG. 108).

[1351] Furthermore, the percent editing at the ROSA26 locus was plotted against the size of the muscle-specific protein promoter, with the results presented in FIG. 109. Of the four tested muscle-specific promoters, the CK8e promoter (construct ID 216) has a similar size of ˜400 bp as that of the UbC promoter and demonstrated a similar level of editing activity.

[1352] AAVs encoding the CasX:gRNA system, in which muscle-specific promoters were used to drive CasX expression, were used to transduce C2C12 myoblasts and myotubes to assess the level of editing activity in muscle cells at the ROSA26 locus, and the editing results are illustrated in FIGS. 115A and 115B for MOI of 3E5 vg/cell and 1E5 vg/cell respectively. The data demonstrate that use of all four muscle-specific promoters, Desmin, CK8e, MHCK7, and MHCK, were able to induce editing at the ROSA26 locus in both types of muscle cells, albeit at variable levels, when packaged and delivered within AAVs.

[1353] An initial proof-of-concept experiment assessing use of the four different muscle-specific promoters was performed in vivo. AAVs containing CasX protein 491, driven by the muscle-specific promoters or the UbC promoter, and guide scaffold 235 with the ROSA26-targetin spacer were delivered in vivo. Both muscle and non-muscle organs were harvested for editing and vg/dg analyses, depicted in bar graphs in FIG. 116 and FIG. 117 respectively. The data in FIG. 116 show that use of AAVs containing muscle-specific promoters driving CasX expression and a ROSA26-targeting gRNA resulted in varying levels of editing activity across all the harvested tissues. In the muscle tissues (DIA, heart, TA, GA, and Quad), AAVs with the muscle-specific promoters demonstrated lower editing activity compared to that when using the UbC promoter to drive CasX expression. However, in the lung, selective editing activity was detected, such that use of muscle-specific promoters resulted in substantially lower editing activity in the lung compared to that of the UbC promoter, suggesting de-targeting of editing activity in the lung (FIG. 116). The results also show that systemic administration of AAVs using either UbC or muscle-specific promoters induced high editing levels in the liver.

[1354] AAV biodistribution was evaluated by quantifying AAV viral particles delivered for a specific tissue using a vg/dg analysis. The vg/dg analysis revealed that similar biodistribution levels were achieved for AAVs containing a muscle-specific promoter or the UbC promoter within a particular tissue (data not shown). Further analysis was performed to determine the relative CasX expression (normalized by vg/dg) driven by muscle-specific promoters CK8e or MHC7 compared to that driven by UbC, and the results are illustrated in FIG. 117. The data demonstrate that after normalizing for delivery to each tissue, use of either muscle-specific promoter CK8e or MHCK7 resulted in higher CasX expression in the muscle tissues relative to the UbC promoter overall, whereas CasX expression in the liver was similar among the promoters compared (FIG. 117). These findings support the significance of using tissue-specific promoters to drive CasX expression within the target tissue to induce editing. The results demonstrate that muscle-specific promoters can be used to drive CasX expression and induce higher editing activity in muscle cell types than in non-muscle cell types when delivered via nucleofection. The data also show that AAVs produced from these AAV plasmids containing muscle-specific promoters were able to induce CasX expression and editing activity in muscle cells in vitro and in vivo when delivered via transduction. The findings also indicate the tissue specificity of using muscle-specific promoters to drive CasX expression compared to use of ubiquitous promoter like UbC. Overall, these findings indicate that muscle-specific promoters can also be utilized in siAAV constructs for delivery and targeting of muscle cells and tissue.

### Example 31: Use of Muscle-Specific Regulatory Elements to Generate AAV Constructs to Produce AAVs that would Transduce and Express CasX More Selectively in Muscle Cells and Tissue

[1355] Experiments will be performed to demonstrate that incorporation of muscle-specific regulatory elements, e.g., promoters and enhancers, into AAV plasmids used for AAV production, will result in more selective expression of CasX and higher editing activity in muscle cell types than in non-muscle cell types when the CasX:gRNA system is delivered by AAVs.

### Materials and Methods:

[1356] CasX variant 491, 515, 593, 668, 672, 676, or 812 will be used for the experiments described herein. AAV construct cloning, AAV production, and AAV titering will be performed as described in Example 1. Various muscle-specific regulatory elements, e.g., promoters (Table 54) and enhancers (Table 55), will be individually cloned into AAV plasmids harboring sequences encoding for a CasX protein and a gRNA with scaffold 235 and an AAVS1-targeting spacer. The resulting AAV plasmids will be used for AAV production and transduction of human skeletal muscle cells (hSKMCs) to determine editing levels at the AAVS1 locus.

TABLE 54
Sequences of muscle-specific promoters.

| SEQ ID | | DNA SEQ | Promoter |
|---|---|---|---|
| NO: | Promoter | ID NO: | size (bp) |
| 3773 | SP-301 | 4055 | 579 |
| 3774 | Desmin | 4053 | 724 |
| 3775 | CK8e | 4051 | 450 |
| 3776 | MHCK | 4054 | 742 |
| 3777 | MHCK7 | 4052 | 776 |
| 3778 | SpC5-12 | 4056 | 358 |

TABLE 55
Sequences of muscle-specific enhancers.

| SEQ ID | | DNA SEQ | Enhancer |
|---|---|---|---|
| NO: | Enhancer | ID NO: | size (bp) |
| 3779 | Muscle Enhancer 1 | 4057 | 495 |
| 3780 | Muscle Enhancer 2 | 4058 | 344 |
| 3781 | Muscle Enhancer 3 | 4059 | 429 |
| 3782 | Muscle Enhancer 4 | 4060 | 434 |
| 3783 | Muscle Enhancer 5 | 4061 | 171 |
| 3784 | Muscle Enhancer 6 | 4062 | 51 |
| 3785 | Muscle Enhancer 7 | 4063 | 60 |
| 3786 | Muscle Enhancer 8 | 4064 | 41 |
| 3787 | Muscle Enhancer 9 | 4065 | 120 |
| 3788 | Muscle Enhancer 10 | 4066 | 474 |
| 3789 | Muscle Enhancer 11 | 4067 | 519 |
| 3790 | Muscle Enhancer 12 | 4068 | 372 |
| 3791 | MyoD Enhancer | 4069 | 256 |
| 3792 | Cardiac Muscle Enhancer 1 | 4070 | 206 |
| 3793 | Cardiac Muscle Enhancer 2 | 4071 | 255 |
| 3794 | Cardiac Muscle Enhancer 3 | 4072 | 277 |
| 3795 | Cardiac Muscle Enhancer 4 | 4073 | 660 |
| 3796 | Myoblast Muscle Enhancer 1 | 4074 | 22 |
| 3797 | Myoblast Muscle Enhancer 2 | 4075 | 310 |
| 3798 | Myoblast Muscle Enhancer 3 | 4076 | 218 |
| 3799 | Myoblast Muscle Enhancer 4 | 4077 | 353 |
| 3800 | Myoblast Muscle Enhancer 5 | 4078 | 50 |
| 3801 | Skeletal Muscle Enhancer 1 | 4079 | 395 |
| 3802 | Skeletal Muscle Enhancer 2 | 4080 | 382 |
| 3803 | Skeletal Muscle Enhancer 3 | 4081 | 135 |
| 3804 | Skeletal Muscle Enhancer 4 | 4082 | 326 |
| 3805 | Skeletal Muscle Enhancer 5 | 4083 | 273 |
| 3806 | Skeletal Muscle Enhancer 6 | 4084 | 148 |
| 3807 | Skeletal Muscle Enhancer 7 | 4085 | 80 |
| 3808 | Skeletal Muscle Enhancer 8 | 4086 | 437 |
| 3809 | Skeletal Muscle Enhancer 9 | 4087 | 297 |

### AAV Transduction In Vitro:

[1357] AAVs will be used to transduce two differentiated states of hSKMCs—myoblasts versus myotubes.

[1358] 500,000 primary hSKMC cells (ATCC, PCS-950-010) will be plated per 2-4×15 cm dishes in growth media (DMEM/F-12, 20% FBS, 1% PenStrep, 2.5 ng/mL b-FGF). Once cells reach 70% confluency, cells will be lifted and re-seeded in a 96-well plate at 5,000-10,000 cells per well in differentiation media (DMEM, 2% horse serum, 1% PenStrep).

[1359] To determine level of CasX-mediated editing in myoblasts, hSKMCs will be transduced with AAVs 4-6 hours after re-seeding in differentiation media at multiple MOIs. Five days following transduction, cells will be harvested for gDNA extraction for editing analysis at the AAVS1 locus by NGS. Briefly, target amplicons will be amplified from 200 ng of extracted gDNA with a set of primers targeting the human AAVS1 locus and processed for NGS as described in Example 23.

[1360] To determine the level of CasX-mediated editing in myotubes, re-seeded hSKMCs into differentiation media will continue to be cultured in differentiation media for an additional 7-10 days to promote differentiation into myotubes. After myotube formation, cells will be transduced with AAVs at multiple MOIs. Five days following transduction, cells will be harvested for editing assessment at the AAVS1 locus by NGS as described above.

[1361] As a comparison to assess muscle-cell specificity of the produced AAVs, non-muscle cells such as HepG2 hepatocytes or human NPCs will also be transduced with AAVs produced from the same AAV plasmids containing the muscle-specific regulatory elements described herein.

[1362] In addition, assessing the incorporation of muscle-specific regulatory elements within an AAV transgene to selectively express CasX in muscle-specific cell types in vivo will also be investigated. These methods for these in vivo experiments are further described in Example 32.

[1363] The results of these experiments are expected to demonstrate that AAVs produced from AAV plasmids containing constructs incorporating muscle-specific regulatory elements (promoter and/or enhancer, see Tables 54 and 55) to drive CasX expression, will demonstrate higher editing activity in muscle-specific cell lines compared to non-muscle cell types.

### Example 32: Use of Muscle-Specific AAV Serotypes to Increase Muscle-Specific Cellular and Tissue Tropism to Enhance CasX-Mediated Editing In Vivo

[1364] Experiments will be performed to demonstrate that use of muscle-specific AAV serotypes may improve specific cellular and tissue tropism and, therefore, enhance delivery and potency of AAVs in the target muscle cells with minimal editing in off-target cell types in vivo.

### Materials and Methods

[1365] AAV plasmid cloning and AAV production and titering will be performed using similar methods described in Example 1. Specifically, the sequences encoding the AAV VP1 serotypes and variants listed in Table 56 will be cloned into relevant pRep/Cap plasmids for use in AAV production.

TABLE 56
Sequences of AAV serotypes to be assessed in vivo.

| AAV serotype | Amino Acid SEQ ID NO: |
|---|---|
| AAV6 | 3810 |
| Rh74 | 3811 |
| RhM4-1 | 3812 |
| AAV9 | 3813 |
| MyoAAV 1A1 | 3814 |
| MyoAAV 1A2 | 3815 |
| MyoAAV 2A | 3816 |

### In Vivo Administration of AAVs and Tissue Processing:

[1366] A dose response experiment will be performed, where ˜1E9 to 1E12 AAV viral particles containing CasX protein 491, 515, 672, or 676 and guide scaffold variant 235 with spacer 35.2 targeting the safe harbor ROSA26 locus will be administered retro-orbitally in C57BL/6J adults. Naïve, untreated mice will serve as experimental controls. Mice will be euthanized at different time points, up to four weeks post-injection. Various tissues, including skeletal muscles (e.g., tibialis anterior, gastrocnemius, soleus, quadriceps, heart, and diaphragm) and other organs (liver, spleen, lung etc.) will be harvested for gDNA extraction using the Zymo Quick DNA/RNA™ miniprep Kit following the manufacturer's instructions. Target amplicons will then be amplified from 200 ng of extracted gDNA with a set of primers targeting the mouse ROSA26 locus and processed as described earlier in Example 18 for editing assessment by NGS.

[1367] Results from the experiments are expected to show that AAVs containing CasX protein and guide scaffold 235 with the ROSA26-targeting spacer will be able to edit the target ROSA26 locus in various muscle tissues. Furthermore, it is expected that higher editing activity will be detected in muscle tissues compared to that detected in other tissues, such as the liver or spleen, which would indicate the ability to increase muscle-specific tissue tropism in vivo by incorporating constructs encoding for muscle-specific AAV serotypes into the pRep/Cap plasmid.

### Example 33: AAV-Mediated Selective Expression of CasX in Photoreceptors Result in Strong On-Target Activity In Vivo by NGS and Structural Analysis

[1368] Experiments were conducted to demonstrate the ability of CasX to edit selectively in the photoreceptors in the mouse retina by restricting its expression with a selective photoreceptor promoter, with a spacer targeting the P23 residue at a therapeutically relevant level in the wild-type retina. We further show strong correlation between editing and proteomic levels in a transgenic reporter model expressing GFP only in rod photoreceptors. Here, we assessed whether CasX variant 491 and guide variant 174 with a spacer targeting the integrated GFP locus generated significant, detectable editing levels in the retina when injected subretinally and evaluated the efficacy of two different viral doses (1.0e+9 and 1.0e+10 vg per eye).

### Methods:

### Generation of AAV Plasmids and Viral Vectors:

[1369] The CasX variant 491 under the control of the various photoreceptor-specific promoters (RP1, RP2, RP3 based on endogenous rhodopsin RHO promoter, and RP4, RP5 based on endogenous G-coupled Retinal Kinase GRK1 promoter; sequences in Table 57), as well as the CMV promoter, and the gRNA guide variant 174/spacer 11.30 (AAGGGGCUCCGCACCACGCC; SEQ ID NO: 4088), targeting mouse RHO exon 1 at P23 residue) under the U6 promoter were cloned into pAAV plasmid flanked with AAV2 ITR. A WPRE sequence was also included in the p59.RP4.491.174.11.30 and p59.RP5.491.174.11.30 plasmids. For the efficacy study in the Nrl-GFP model, spacer 4.76 (UGUGGUCGGGGUAGCGGCUG; SEQ ID NO: 4089) targeting GFP was cloned into AAV-cis plasmid p59.RP1.491.174 using standard cloning methods.

TABLE 57
Rho promoter sequences.

| Promoter | PR construct | DNA SEQ ID NO: |
|---|---|---|
| RHO | RP1 | 4090 |
| RHO535-CAG | RP2 | 4091 |
| RHO-intron | RP3 | 4092 |
| GRK1 | RP4 | 4093 |
| GRK1-SV40 | RP5 | 4094 |
| GRK1-CAG | RP6 | 4095 |

[1370] AAV production and AAV titering were performed as described in Example 1.

[1371] The AAV vector AAV.RP1.491.174.4.76 was produced at the University of North Carolina (UNC) Vector Core using the triple transfection methods in HEK239T.

### Subretinal Injections:

[1372] Subretinal injections were performed on 4-5-week-old C57BL/6J mice and heterozygous Nrl-GFP/C57BL/5J mice (Jackson Laboratories). Briefly, mice were anesthetized, and proparacaine was applied topically on the cornea, and the eyes were dilated with drops of tropicamide and phenylephrine. Eyes were kept lubricated with GenTeal gel during surgery. Under a surgical microscope, an ultrafine 30½-gauge disposable needle was passed through the sclera, at the equator and next to the limbus, to create a small hole into the vitreous cavity. Using a blunt-end needle, 1-1.5 μL of virus was injected directly into the subretinal space, between the RPE and retinal layer. Each mouse from the experimental groups was injected in one eye with 1.0e+9, 5.0e+9 or 1.0e+10 vg per eye, and the contralateral eye injected with the AAV formulation buffer.

### Western Blot:

[1373] To generate protein lysates, eyes were freshly enucleated and dissected in ice-cold PBS, snap-frozen in dry ice, and resuspended in RIPA buffer (150 mM NaCl, 1% NP40, 0.5% deoxycholate, 0.1% SDS, 50 mM Tris pH8.0, dH20) freshly supplemented with protease inhibitors (5 mg/mL final concentration), DTT and PMSF (final concentration 1 mM respectively) in individual 1.5 mL Eppendorf tube per retina. Retinal tissue was further homogenized in small pieces using a RNA-free disposable pellet pestles (Fisher scientific, #12-141-364) and incubated on ice for 30 minutes, flipping the tube occasionally to gently mix. Samples were then centrifuged at 4° C. at full speed for 20 minutes to pellet genomic DNA. Protein extracts and gDNA cell pellets were then separated. For protein extracts, supernatants were collected. Protein concentrations were determined by BCA assay and read on Tecan plate reader. 15 μg of total protein lysate of mouse retina were separated by SDS-PAGE (Bio-Rad TGX gels) and transferred to polyvinylidene difluoride membranes using the Transblot Turbo. The membranes were blocked with 5% nonfat dry milk for 1 h at room temperature and incubated overnight at 4° C. with the primary antibody. Then, blots were washed with Tris-buffered saline with the Tween-20 (137 mM sodium chloride, 20 mM Tris, 0.1% Tween-20, pH 7.6) for three times and incubated with the horseradish peroxidase-conjugated anti-rabbit or anti-mouse secondary antibody for 1 hour at room temperature. After washing three times, the membranes were developed using Chemiluminescent substrate ECL and imaged on the ChemicDoc (X). Blot images were processed with ImageLab.

### Tissue Processing and NGS Analysis:

[1374] Animals were sacrificed, and the eyes enucleated in fresh PBS. Whole retinae were isolated from the eye cups and processed for gDNA extraction as described previously in the western blot section. Genomic gDNA pellets were processed with the DNeasy Blood & Tissue Kit (Qiagen®) according to the manufacturer's instructions. Amplicons were amplified from 200 ng of gDNA with a set of primers targeting the genomic region of interest. Amplicons were bead-purified (Beckman coulter, Agencourt Ampure XP) and then re-amplified to incorporate Illumina™ adapter sequence. Specifically, these primers contained an additional sequence at the 5′ ends to introduce Illumina™ read and 2 sequences as well as a 16 nt random sequence that functions as a unique molecular identifier (UMI). Quality and quantification of the amplicon was assessed using a Fragment Analyzer DNA analyzer kit (Agilent, dsDNA 35-1500 bp). Amplicons were sequenced on the Illumina™ Miseq™ according to the manufacturer's instructions. Raw fastq files from sequencing were processed as follows: (1) the sequences were trimmed for quality and for adapter sequences using the program cutadapt (v. 2.1); (2) the sequences from read 1 and read 2 were merged into a single insert sequence using the program flash2 (v2.2.00); and (3) the consensus insert sequences were run through the program CRISPResso2 (v 2.0.29), along with the expected amplicon sequence and the spacer sequence. This program quantifies the percent of reads that were modified in a window around the 3′ end of the spacer (30 bp window centered at −3 bp from 3′ end of spacer). The activity of the CasX molecule was quantified as the total percent of reads that contain insertions, substitutions and/or deletions anywhere within this window.

### Immunohistology:

[1375] Enucleated eyes were placed in 10% formalin overnight at 4° C. Retinae were dissected out from the eye cups, rinsed in PBS thoroughly and immersed in 15%-30% sucrose gradient. Tissues were embedded in optimal cutting temperature (OCT), frozen on dry ice before being transferred to −80° C. storage. 20 μM sections were cut using a cryostat. The sections were blocked for >1 hour at room temperature in the blocking buffer (2% normal goat serum, 1% BSA, 0.1% Triton-X 100) before antibody labeling. The antibodies used were: anti-mouse HA (abcam, 1:500); Alexa Fluor 488 rabbit anti-mouse (Invitrogen™, 1:2000). Slides were counterstained with Hoechst 33342 (Thermo Fisher Scientific™, Hemel Hempstead, UK) and mounted with Prolong Diamond antifade mounting medium (Thermo Fisher Scientific™, Hemel Hempstead, UK). Confocal fluorescence imaging was subsequently performed using the LSM-710 inverted confocal microscope system (Carl Zeiss, Cambridge, UK).

### Results:

[1376] Editing levels were quantified at the mRHO exon locus in 3-week-old C57BL/6J that were injected subretinally with AAV vectors expressing CasX 491 under the control of multiple engineered retinal and ubiquitous promoters to identify promoters driving strong levels of editing in the photoreceptors, with spacer 11.30. Rod-specific RP1, RP2, RP3, RP4 promoters mediated very similar levels of editing (˜20%). Vectors AAV.RP5.491.174.11.30 and AAV RP5.491.WPRE.174.11.30 led to lower expression levels (˜10 and 8% respectively, FIG. 123A). We identified optimized vectors AAV.RP1.491.174.11.30 as most potent vectors for further functional and distribution study, with the goal of achieving high levels of editing in vivo in photoreceptors as well as making the transgene plasmid significantly smaller in size to package within the AAV (100-400 bp shorter than other constructs with similar level of activity (FIG. 123B). This optimized construct was further validated by conducting an efficacy study in a transgenic model expressing GFP in rod photoreceptors, a convenient model used in the field to validate rod-specific or knock down of protein. AAV.RP1.491.174.4.76 vectors were injected at 2 different doses to study efficacy. 4 and 12-weeks post-injections, editing levels at the integrated GFP locus were quantified by NGS, and detectable editing levels were observed. With the 1.0E+9 vg/eye dose arm, we observed ˜8% of editing levels. With the increased dose group injected with 1.0e+10 vg, 10% editing levels were detectable at 4-weeks, which increased by 2-fold in the follow-up time point, 12-weeks post-injections (FIG. 124).

[1377] Editing levels were confirmed by structural and proteomic analysis. Western blot analysis of 12-week post-injection retinal lysates showed strong correlation between levels of editing and reduction in GFP protein (FIG. 125B), with protein knock-down detected with as low as 5% editing in whole-retina. GFP protein levels were significantly lower than the vehicle group in the AAV-CasX-treated retinas at the 1.0e+10 vg/eye dose (FIG. 125A).

[1378] These results were also confirmed by in vivo fundus imaging of GFP fluorescence. The ratio of superior to inferior retina mean grey values showed a reduction in 20% and 50% GFP fluorescence by week 12 (FIG. 126A). A complete decrease in GFP fluorescence over time was visible within the quadrant who received the subretinal injection only in the injected retinas compared to the vehicle group (FIG. 126B).

[1379] Immunochemistry staining confirmed (FIG. 127) the decrease of GFP protein expression in rod photoreceptors. Representative confocal images show strong GFP expression in the retinae injected with only the AAV formulation buffer. Whole retina is expressing GFP, matching with the nuclei staining (panels A-C of FIG. 127). No HA expression was detectable, as a read-out of AAV-mediated CasX transgene expression (panel D of FIG. 127). Retinae injected with 1.0e+9 and 1.0e+10 showed strong decrease in GFP expression in whole retina sections, in a dose-dependent manner (panels E-L of FIG. 127), which correlated with detectable levels of HA only rod outer segments (OS) and outer nuclear layers (ONL), confirming the promoter RP1 selectivity for rod photoreceptors. High dose treatment resulted in complete knockdown of injected retina (˜50% of GFP knockdown in whole-retina, as injection is limited to the superior gradient) while the 1.0e+9 vg dose decreased ˜50% of GFP expression in localized area (panels G and K of FIG. 127) compared to control (panel C of FIG. 127).

[1380] The results demonstrate proof-of-concept that CasX with a gRNA targeting the mouse P23 RHO locus can achieve therapeutically-relevant editing levels at the mouse P23 locus when only expressed in rod-photoreceptors, the therapeutic cell target, via AAV-mediated subretinal delivery. Furthermore, the specificity and efficacy of the vector were demonstrated by conducting a follow-up study targeting a GFP locus integrated in a reporter model overexpressing GFP in photoreceptors in which the results show a strong correlation between editing levels and protein knock-down assessed by western blot, fundus imaging and histology.

### Example 34: AAV-Mediated Selective Expression of CasX in Rod and Cone Photoreceptors Results in Strong On-Target Activity at a Safe Harbor Locus in the Murine Retinae

[1381] Experiments were performed to demonstrate the ability of CasX to edit selectively rod and cone photoreceptors in the mouse retina by restricting its expression with a selective photoreceptor promoter, with a gRNA spacer targeting a safe harbor locus in the mouse genome. The correlation between editing and proteomic levels was demonstrated in a transgenic reporter mouse model that expressed GFP only in the rod photoreceptors.

### Materials and Methods:

### Generation of AAV Plasmids and Viral Vectors:

[1382] CasX variant 491, flanked on either side by a c-MYC NLS, under the control of the various photoreceptor-specific promoters (listed in Table 58) based on the endogenous G-coupled Rhodopsin Kinase 1 (GRK1) promoter, and the gRNA guide variant 235 with spacer 35.2 (AGAAGAUGGGCGGGAGUCUU; SEQ ID NO: 4096) targeting the mouse ROSA26 locus under the U6 promoter, were cloned into a pAAV plasmid flanked with AAV2 ITR using standard cloning methods.

TABLE 58
Sequences of GRK1 promoter variants.

| Promoter | DNA SEQ ID NO: |
|---|---|
| GRK1(93) | 4097 |
| GRK1(94) | 4098 |
| GRK1(174) | 4099 |
| GRK1(199) | 4100 |
| GRK1(241) | 4101 |
| GRK1(292) | 4102 |
| GRK1(292)-SV40 | 4103 |
| GRK1-SV40 | |

[1383] AAV production and AAV titering were performed as described in Example 1.

[1384] Subretinal injections were performed in C57BL/6J mice as described in Example 33. Each mouse from the experimental groups was injected in one eye with 5E8 vg per eye. AAVs containing the GRK1-SV40 with a non-targeting (NT) gRNA served as an experimental control.

[1385] The processing of tissues, which were harvested three weeks post-injection, and subsequent NGS analysis were performed as described in Example 33. Briefly, gDNA was extracted using the Zymo Quick DNA/RNA™ miniprep Kit following the manufacturer's instructions and used for the amplification of the target amplicon at the ROSA26 locus. Target amplicons were sequenced and processed as described in Example 33.

ddPCR Analysis of AAV Genomes (Vg/Dg):

[1386] The number of AAV viral genomes (vg) per diploid genome (dg) was determined in gDNA samples extracted from harvested tissues by ddPCR using the Bio-Rad QX200 Droplet Digital PCR instrument according to standard methods and following the manufacturer's protocol and guidelines. Briefly, ddPCR reactions containing the extracted gDNA samples were set up, serially diluted, and subjected to droplet formation using the droplet generator. Within each droplet, a PCR amplification reaction was performed using a primer-probe set specific to CasX, an indicator of the transgene, and mouse RPP30, an indicator of the mouse genome. Subsequently, droplet fluorescence was determined using the QX200 Droplet Reader with the Bio-Rad QuantaSoft software. To calculate total vg/dg for each tissue, the total quantified copy amount for CasX was divided by the copy amount calculated for RPP30, and then divided by 2 (diploid genome per cell).

### Results:

[1387] Editing levels at the ROSA26 locus were quantified in retinae harvested from mice injected subretinally with AAVs expressing CasX 491 under the control of various engineered retinal promoters (listed in Table 58) to identify promoters driving the strongest levels of CasX-mediated editing in the photoreceptors. FIG. 118 is a box plot that shows the quantification of these editing levels at the ROSA26 locus for the indicated GRK1 promoter variants. The data demonstrate that use of the GRK1 promoter variants to drive CasX expression resulted in similar levels of editing (˜30-38%). Of the promoter variants tested, AAVs containing the GRK1(292)-SV40 and GRK1(241) promoter variants yielded the highest average editing levels, achieving 37.73±10.89% and 38.27±11.98% editing respectively (FIG. 118). As illustrated in FIG. 118, use of GRK1(292)-SV40 and GRK1(241) promoters resulted in the maximum editing that could be achieved in the photoreceptors (dashed line, which indicates the theoretical maximum editing of photoreceptors that can be achieved with optimal transduction).

[1388] Additional analyses were performed by correlating editing levels achieved when using a particular promoter variant with the vg/dg quantification, to account for potential variation in AAV delivery. The editing profile for each promoter variant was plotted with the corresponding vg/dg value, and a nonlinear regression curve was fitted to assess the correlation (FIGS. 119A-119C). The data demonstrate that there is an overall positive correlation between AAV dose (vg/dg) and percent editing, such that higher amount of AAV delivered would correlate with higher editing. Slope values were calculated for each regression plot, and the calculations are displayed in Table 59. Analysis of the slope values revealed that an increase from 1 vg/dg to 2 vg/dg for AAVs containing the GRK1(292)-SV40 or GRK1(292) promoter resulted in the highest incremental change in editing levels compared to the incremental changes achieved for the shorter promoter variants (Table 59, FIGS. 119A-119C). Furthermore, higher variability in editing levels was observed with use of the shorter promoter variants, especially with use of GRK1(199) and GRK1(94), indicated by the higher standard deviation values calculated for the corresponding slopes of the curves (Table 59, FIGS. 119A-119C). The data also show that saturation in editing was achieved when >1.5 vg/dg, given the flattening of the curve observed (FIGS. 119A-119C). Interestingly, use of the GRK1(93) promoter appeared to exhibit stronger editing kinetics compared to the GRK1(199) and GRK1(94) promoters, given the higher slope value observed (Table 59).

TABLE 59
Slope values calculated from the nonlinear
regression curves in FIGS. 119A-119C.

| Promoter | Slope value | Standard deviation of slope |
|---|---|---|
| GRK1(292)-SV40 | 23.78 | 5.809 |
| GRK1(292) | 26.65 | 8.124 |
| GRK1(241) | 15.17 | 11.78 |
| GRK1(199) | 8.792 | 21.35 |
| GRK1(94) | 11.44 | 12.02 |
| GRK1(93) | 16.6 | 15.31 |

[1389] The results from these experiments demonstrate proof-of-concept that CasX, driven by the various photoreceptor-specific promoters with the targeting gRNA, can achieve editing in the photoreceptor cells of the retinae when delivered by AAVs via subretinal administration. Variable levels of editing were achieved when using the different promoter variants, suggesting that stronger promoters can be used to drive higher CasX expression to achieve therapeutic outcomes, while weaker promoters may be used as a strategy for tuning CasX expression and consequent editing activity within the context of self-inactivating AAVs. Furthermore, given the limited cargo capacity of the AAV transgene, use of a shorter tissue-specific promoter to drive sufficient CasX expression to induce editing would be especially beneficial in the context of a dual-guide AAV vector.

### Example 35: In Vivo Administration of the siAAV-CasX (siAAV) System Results in Efficient Editing at a Target Locus while Inducing CasX Self-Inactivation In Vivo

[1390] Experiments were performed to measure genome editing and siAAV depletion in vivo in mice administered siAAVs with zero, one, or two STALL sites.

### Materials and Methods

[1391] siAAVs encoding CasX variant 491 with guide scaffold 235 and spacers targeting either the ROSA26 locus or a non-targeting control were used in these in vivo experiments. Specifically, siAAV constructs were engineered such that there was either one or two STALL sites adjacent to the CasX coding sequence. In the constructs with one STALL site, there was one ROSA26 protospacer sequence 5′ of the CasX coding sequence, preceded by an ATCN, CTCN, or GTCN PAM (siAAV constructs 146, 159, and 160, respectively). In the constructs with two STALL sites, the CasX coding sequence was flanked on both the 5′ and 3′ end by a ROSA26 protospacer sequence, which were both preceded by either an ATCN, CTCN, or GTCN PAM (siAAV constructs 161, 162, and 163, respectively). As controls, constructs with one or two ATCN STALL sites were used with sgRNAs targeting the AAVS1 locus (siAAV constructs 164 and 165, respectively). The AAVS1 locus was not present in the mice used in this experiment; accordingly, these constructs served as negative controls in which the target of the sgRNA did not match the identity of the protospacer sequence at the STALL site. Finally, constructs without STALL sites with sgRNAs targeting either ROSA26 or AAVS1 were used (siAAV constructs 140 and 166, respectively). A summary of the constructs is provided in Table 60, below. The nucleic acid sequences of the constructs are provided in Table 61. AAV constructs were cloned and AAVs were produced using adherent HEK293T cells as described in Example 1.

TABLE 60
Description of siAAV constructs with
zero, one, or two STALL sites

| | Number | | | | SEQ ID NO |
|---|---|---|---|---|---|
| siAAV | of | STALL | | | (full-length |
| Construct | STALL | site | Target of | Spacer | construct |
| ID | sites | PAM | sgRNA | ID | sequence) |
| 140 | 0 | n/a | ROSA26 | 35.2 | 4141 |
| 146 | 1 | ATCN | ROSA26 | 35.2 | 4142 |
| 159 | 1 | CTCN | ROSA26 | 35.2 | 4143 |
| 160 | 1 | GTCN | ROSA26 | 35.2 | 4144 |
| 161 | 2 | ATCN | ROSA26 | 35.2 | 4145 |
| 162 | 2 | CTCN | ROSA26 | 35.2 | 4146 |
| 163 | 2 | GTCN | ROSA26 | 35.2 | 4147 |
| 164 | 1 | ATCN | AAVS1 | 31.63 | 4148 |
| | | | (“non-targeting”) | | |
| 165 | 2 | ATCN | AAVS1 | 31.63 | 4149 |
| | | | (“non-targeting”) | | |
| 166 | 0 | n/a | AAVS1 | 31.63 | 4150 |
| | | | (“non-targeting”) | | |

TABLE 61
Sequences of siAAV constructs with
zero, one, or two STALL sites

| siAAV | | |
|---|---|---|
| Construct | | DNA SEQ |
| ID | Component Name | ID NO: |
| 140, 166 | 5′ ITR | 423 |
| | buffer sequence | 788 |
| | UbC promoter | 464 |
| | buffer sequence | 789 |
| | Kozak | NA |
| | start codon | NA |
| | 5′ c-MYC NLS | 838 |
| | Linker | NA |
| | CasX 491 | 791 |
| | Linker | NA |
| | 3′ c-MYC NLS | 2985 |
| | Stop codon | NA |
| | buffer sequence | 794 |
| | bGH poly(A) signal | 514 |
| | buffer sequence | NA |
| | U6 promoter | 661 |
| | buffer sequence | NA |
| | Scaffold 235 | 698 |
| | Spacer | |
| | buffer sequence | 796 |
| | 3′ ITR | 424 |
| 146, 159, | 5′ ITR | 423 |
| 160, 164 | buffer sequence | 788 |
| | UbC promoter | 464 |
| | buffer sequence | 789 |
| | STALL site 1 | |
| | Kozak | NA |
| | start codon | NA |
| | 5′ c-MYC NLS | 838 |
| | Linker | NA |
| | CasX 491 | 791 |
| | Linker | NA |
| | 3′ c-MYC NLS | 2985 |
| | Stop codon | NA |
| | buffer sequence | 794 |
| | bGH poly(A) signal | 514 |
| | buffer sequence | NA |
| | U6 promoter | 661 |
| | buffer sequence | NA |
| | Scaffold 235 | 698 |
| | Spacer | |
| | buffer sequence | 796 |
| | 3′ ITR | 424 |
| 161-163, | 5′ ITR | 423 |
| 165 | buffer sequence | 788 |
| | UbC promoter | 464 |
| | buffer sequence | 789 |
| | STALL site 1 | — |
| | Kozak | NA |
| | start codon | NA |
| | 5′ c-MYC NLS | 838 |
| | Linker | NA |
| | CasX 491 | 791 |
| | Linker | NA |
| | 3′ c-MYC NLS | 2985 |
| | Stop codon | NA |
| | buffer sequence | 4104 |
| | STALL site 2 | — |
| | buffer sequence | 4105 |
| | bGH poly(A) signal | 514 |
| | buffer sequence | NA |
| | U6 promoter | 661 |
| | buffer sequence | NA |
| | Scaffold 235 | 698 |
| | Spacer | — |
| | buffer sequence | 796 |
| | 3′ ITR | 424 |
| 140, 146, | ROSA26 spacer 35.2 | 2920 |
| 159-163 | | |
| 164-166 | AAV-S1 | 4106 |
| | (“non-targeting”) spacer 31.63 | |
| 146, 161, | ATCN STALL site | 2984 |
| 164-165 | | |
| 159, 162 | CTCN STALL site | 4107 |
| 160, 163 | GTCN STALL site | 4108 |

* Components are listed in a 5′ to 3′ order within the constructs

[1392] Briefly, 8E9 siAAV particles were administered intracerebroventricularly into C57Bl/6 P0-P1 neonates. Three weeks and 16 weeks post-injection, mice were euthanized by terminal anesthesia followed by transcardiac perfusion. Brains and (at the 16 week timepoint) liver were harvested and RNA and gDNA was extracted using the Zymo Quick-DNA/RNA™ miniprep kit according to the manufacturer's instructions. RNA and gRNA were also extracted from a naïve mouse, as a control. The abundance of viral genomes per diploid genome (vg/dg) was determined as an indication of the number of siAAV genomes per mouse cell.

### Assessment of RNA Levels by RT-qPCR:

[1393] RNA extracted from brain tissue was used as input for reverse transcription. The resulting cDNA served as input for qPCR reactions to quantify the amount of transcribed CasX and guide scaffold 235 using HEX/FAM-based detection with primers-probe sets targeting CasX or guide scaffold 235. Expression of the ACTB housekeeping gene was used for normalization. Expression data were analyzed according to the double delta Ct method. Statistical significance was calculated using a 1-way ANOVA with Dunnett's Multiple Comparison test.

### Assessment of ROSA26 Editing by NGS:

[1394] Target amplicons were amplified from extracted gDNA with a set of primers targeting the mouse ROSA26 locus and processed for NGS as described in Example 23.

### Results:

[1395] siAAV vectors with zero, one, or two STALL sites were administered to mice, and the level of AAV genome per mouse cell, mRNA encoding CasX, guide scaffold 235, and editing of the ROSA26 locus was measured at three weeks and 16 weeks following administration. Three weeks following siAAV administration, viral genomes, RNA encoding CasX, and guide scaffold 235 were detectable in all samples except for samples from the naïve mouse (see FIGS. 128, 129A, and 129B). The vg/dg, level of CasX mRNA, and level of sgRNA varied between animals. At 16 weeks following administration, viral genomes were found in the liver and cortex for all constructs tested (FIG. 131).

[1396] Three weeks following administration, the siAAV constructs achieved high levels of editing at the ROSA26 locus, which were only slightly lower than the construct targeting ROSA26 without a STALL site (construct 140; see FIG. 130). At 16 weeks, editing levels were generally higher than at three weeks (see FIG. 133A compared to FIG. 134). At the 16 week timepoint the siAAV constructs again showed a high level of editing compared to construct 140. The high level of editing observed indicates that editing in the liver was likely saturated.

[1397] At the 16 week timepoint, CasX mRNA expression in the cortex was decreased in the single STALL constructs (siAAV constructs 146, 159, and 160) compared to construct 140 (FIG. 132B). There was no decrease in CasX mRNA expression with the double STALL constructs in the cortex (FIG. 132B). In the liver, there was no differences in CasX mRNA expression between the constructs with or without STALL sites, with the exception the elevated expression seen in a mouse with construct 146 (FIG. 132A).

[1398] Significant decreases in scaffold 235 expression were observed in the cortex with all single STALL siAAVs, as well as the CTCN and GTCN double STALL constructs (siAAV constructs 162 and 163, respectively) compared to construct 140 (see FIG. 133B). Construct 165, with mismatched double STALL sites, was also significantly decreased. Specifically, the level of scaffold 235 abundance in mice administered constructs 146, 159, and 163 was significantly different from that in mice administered construct 140 at p<0.05. The level of scaffold 235 abundance in mice administered constructs 160, 162, and 165 was significantly different from that in mice administered construct 140 at p<0.01. There were no significant differences in scaffold 235 expression in the liver (FIG. 133B).

[1399] The results of this experiment demonstrate that siAAV constructs achieve gene editing in mice in vivo. This was true for siAAV constructs with one or two STALL sites, and with ATCN, CTCN, or GTCN STALL sites. Further, depletion of the guide scaffold was seen 16 weeks following in vivo administration for both siAAV constructs with single and double STALL sites. It is believed that variability between injections to mice may account for some of the variability seen in this experiment.

### Example 36: Systemic Delivery of AAV and siAAV in Mice

[1400] An experiment will be performed in which AAV and siAAV are administered systemically to mice, and genome editing and depletion of the siAAV vector will be assessed.

### Materials and Methods

[1401] AAVs and siAAVs encoding CasX variant 491 with guide scaffold 235 and a spacer targeting the ROSA26 locus were used. The AAV construct was construct 140, which has an sgRNA targeting ROSA26, and does not have a STALL site, as described in Example 35. The siAAV construct was construct 146, which has an sgRNA targeting ROSA26 and a single ATCN STALL site, as described in Example 35.

[1402] Mice were divided into five cohorts, with four mice per cohort. In the first four cohorts, mice were administered either 3e11 or 3e10 vg doses of either AAV or siAAV. In the fifth cohort, mice were administered a 3e11 vg dose with a 1:1 ratio of AAV and siAAV. This pooled dose of both XAAV and siAAV is believed to be an important control to account for the possibility of variability between injections to mice.

[1403] The AAV and siAAV vectors were administered by intraosseous infusion. Mice will be sacrificed at four timepoints, 3, 7, 28, and 60 days following AAV administration.

[1404] Liver and heart tissues will be harvested, and RNA, gDNA, and protein will be extracted. Target amplicons will be amplified from extracted gDNA with a set of primers targeting the mouse ROSA26 locus and processed for NGS as described in Example 23. The abundance of mRNA encoding CasX and sgRNA will be measured by RT-PCR, as described in Example 35. The abundance of CasX protein will be measured by western blot.

### Results:

[1405] The results are expected to show the rate of clearance of siAAV episome, the number of days required to reach undetectable levels of siAAV viral genome, the extent of CasX inactivation, and the editing rate of the AAV and siAAV vectors.

### Example 37: Demonstration that Varying the Placement and Orientation of the gRNA Promoter in the CasX:Dual-gRNA System Expressed from an All-In-One AAV Vector can Affect Editing of the Target Locus

[1406] The experiments in Example 9 showed that the CasX:dual-gRNA system packaged and delivered within a single AAV was able to edit the target gene. Here, experiments were performed to demonstrate that placement and orientation of the gRNA promoters within the AAV transgene to drive expression of dual gRNAs can affect the efficiency of the dual-cut editing of a target locus. Within the AAV plasmid, gRNA promoters could be placed upstream, downstream, or flanking the CasX construct and could be in a forward or reverse orientation. The various configurations of the dual-gRNA transcriptional units relative to the CasX construct within the AAV transgene are illustrated in FIGS. 35-36 and FIG. 112.

### Materials and Methods

[1407] AAV plasmid constructs were generated and cloned into a pAAV plasmid flanked with AAV2 ITRs using standard molecular cloning methods as described in Example 1. Briefly, dual-gRNA AAV plasmids were generated to express CasX variant 491 driven by the ubiquitous UbC promoter and two gRNA transcriptional units that each expressed a Pol III U6 promoter-guide scaffold 235-a specific spacer combination (spacer 12.7 targeting the tdTomato locus (SEQ ID NO: CTGCATTCTAGTTGTGGTTT, SEQ ID NO: 462) and/or a non-targeting spacer. In this example, the two gRNA transcriptional units were cloned relative to the CasX construct using configuration #1, #2, and #4 (illustrated in FIGS. 35-36) and tested. Table 62 below shows the combinations of spacers tested for each of the three configurations of dual gRNA units relative to the CasX construct.

TABLE 62
Combinations of a tdTomato-targeting spacer (12.7) and a non-targeting
(NT) spacer tested in this example in configuration #1, #2, and
#4 (illustrated in FIGS. 35-36) of dual gRNA units relative to
the CasX 491 construct. The “R” preceding the spacer denotes
the reverse orientation of the transcription of the indicated gRNA unit.

| Configuration # | Specific spacer combination tested |
|---|---|
| #1 | NT-CasX 491-NT |
| #1 | 12.7-CasX 491-NT |
| #1 | NT-CasX 491-12.7 |
| #1 | 12.7-CasX 491-12.7 |
| #4 | R.NT-CasX491-NT |
| #4 | R.12.7-CasX 491-NT |
| #4 | R.NT- CasX 491-12.7 |
| #4 | R.12.7- CasX 491-12.7 |
| #2 | CasX 491-NT-NT |
| #2 | CasX 491-12.7-NT |
| #2 | CasX 491-NT-12.7 |
| #2 | CasX-12.7-12.7 |

[1408] AAV nucleofection of tdTomato mNPCs was performed as described in Example 1. Briefly, 125 ng of AAV plasmid encoding for XAAVs expressing the CasX:dual-gRNA system with the various configurations listed in Table 62 were nucleofected mNPCs. Five days post-nucleofection, mNPCs were harvested for editing analysis at the tdTomato locus by FACS, as described in Example 1. For comparison, AAV plasmid encoding for XAAVs expressing CasX 491 with a single gRNA transcriptional unit using spacer 12.7 was also used in this example.

[1409] AAV production and AAV titering were performed as described in Example 1.

AAV Transduction of tdTomato mNPCs, Followed by Flow Cytometry:

[1410] ˜10,000 mNPCs were seeded per well in PLF-coated 96-well plates; 48 hours later, seeded cells were transduced with AAVs expressing the CasX:dual-gRNA system of various configurations (Table 62). All viral infection conditions were performed in triplicate, with a normalized number of viral genomes (cg) among experimental vectors, in a series of three-fold dilution of MOI ranging from −1E5 to 1E3 vg/cell. Five days post-transduction, XAAV-treated mNPCs were harvested for editing analysis at the tdTomato locus by FACS, as described earlier in Example 1. For comparison, AAVs expressing CasX 491 with a single gRNA transcriptional unit using spacer 12.7 were also assayed in this example.

### Results:

[1411] tdTomato mNPCs were nucleofected with AAV plasmids encoding for dual-guide AAVs expressing the CasX:dual-gRNA system in various vector configurations with different spacer combinations of spacer 12.7 or a non-targeting spacer (listed in Table 62). Editing levels at the tdTomato locus were subsequently assessed to determine the difference in editing level achieved and driven by a spacer in a particular orientation and position, and the results are illustrated in FIG. 120. The data indicate that for configuration #1 (FIG. 35), the editing levels achieved appeared to be primarily driven by the second gRNA positioned on the 3′ end of the CasX construct in the sense orientation, since use of the NT-CasX 491-12.7 AAV construct resulted in ˜80% editing, while use of the 12.7-CasX 491-NT construct resulted in ˜20% editing (FIG. 120). In addition, use of the NT-CasX 491-12.7 construct resulted in similar levels of editing as use of the AAV construct with two 12.7 spacers (12.7-CasX 491-12.7; FIG. 120). The data further showed that positioning and orienting the gRNA units in configurations #4 and #2 (FIG. 35) appeared to induce similar levels of editing overall between the two gRNA units within an AAV transgene (FIG. 120).

[1412] tdTomato mNPCs were also transduced with dual-guide AAVs expressing the CasX:dual-gRNA system in configurations #1, #2, and #4 (FIGS. 35-36) with different spacer combinations (Table 62) at varying MOIs, and editing levels were subsequently assessed, with the resulted portrayed in FIGS. 121A-121C. The data demonstrate that for configuration #1, each gRNA unit was able to achieve similar levels of editing, when comparing the editing levels induced by AAVs containing the 12.7-CasX 491-NT construct with those achieved by AAVs containing the NT-CasX 491-12.7 construct (FIG. 121A). Notably, AAVs containing the 12.7-CasX 491-12.7 construct induced comparatively higher editing than either of the spacer 12.7-NT combination (FIG. 121A). For configuration #4, AAVs containing the R.12.7-CasX 491-NT construct appeared to achieve a slightly higher editing level at the highest MOI tested (˜-1E5 vg/cell), suggesting that the gRNA placed 5′ of the CasX construct and in antisense orientation was more active than its counterpart positioned 3′ to the CasX construct in the sense orientation (FIG. 121B). Interestingly, AAVs containing the R12.7-CasX 491-12.7 construct did not induce the highest level of editing out of all the spacer combinations tested for configuration #4, suggesting a saturation in editing levels achieved given the limitation in gRNA expression (FIG. 121B). Lastly, for configuration #2, the data demonstrate that at the highest MOI tested of 1E5, XAAVs with the CasX 491-12.7-NT construct induced ˜20% editing and XAAVs with the CasX 491-12.7-12.7 induced ˜40% editing, suggesting that each gRNA in either position in the sense orientation was able to drive a similar level of editing as its partner (FIG. 121C). A comparison of AAVs expressing a CasX:dual-guide system with two 12.7 spacers in configuration #1, #2, and #4 revealed that use of AAVs expressing the CasX:dual-gRNA system in configuration #2 induced the highest level of editing (˜47.6±8%), compared to ˜27.7±3.3% editing and ˜14.3±5% editing for configuration #4 and #1 respectively (FIG. 122).

[1413] The results from these experiments demonstrate that use of gRNAs in different positions and orientations relative to the CasX encoding construct within the AAV transgene can achieve efficient dual-cut editing at the target locus. Furthermore, varying the specific position and orientation of the gRNA unit can affect the editing efficiency. The findings from these experiments indicate the potential to use the dual-guide system within the context of siAAV vectors. Using the dual-guide system would enable effective modulation and tuning of CasX-mediated editing and self-cleavage activity that would progressively remove the AAV episome in edited cells to mitigate potential off-target effects. More specifically, siAAV vectors could be designed such that the therapeutic targeting gRNA would be in the position and orientation that would induce highly effective editing, and a second gRNA within the same AAV transgene would be in the position and orientation that would enable its expression at lower but sufficient levels to induce self-inactivation of CasX.

TABLE 63
Encoding DNA sequences for CasX variants

| CasX | DNA SEQ ID NO |
|---|---|
| CasX 438 | 747 |
| CasX 488 | 748 |
| CasX 491 | 749 |
| CasX 515 | 750 |
| CasX 527 | 751 |
| CasX 535 | 752 |
| CasX 536 | 753 |
| CasX 537 | 754 |
| CasX 583 | 755 |
| CasX 660 | 756 |
| CasX 661 | 757 |
| CasX 662 | 758 |
| CasX 663 | 759 |
| CasX 664 | 760 |
| CasX 668 | 761 |

[1414] Table 64 provides all the individual components of the constructs from Examples 1-37.

TABLE 64
AAV construct component sequences for Examples 1-37

| | | | SEQ ID |
|---|---|---|---|
| Component | Name | AAV construct ID | NO: |
| 5′ ITR | AAV2 ITR (alternate) | 1-174, 177-186, 207-220 | 423 |
| | CpG-depleted 5′ ITR | — | 2918 |
| Enhancer + | CMV | 1-3, 7, 24-33, 44-52, 103-117, 211-214 | 463 |
| core promoter | N/A | 1-3, 7, 24-33, 44-52, 64-71, 103-117, 156 | 493 |
| | Syn 1 | 65 | 764 |
| | NPC5 | 66 | 765 |
| | NPC7 | 67 | 766 |
| | NPC127 | 68 | 767 |
| | NPC190 | 69 | 768 |
| | NPC249 | 70 | 769 |
| | NPC286 | 71 | 770 |
| Enhancer | Muscle Enhancer 1 | — | 4057 |
| | Muscle Enhancer 2 | — | 4058 |
| | Muscle Enhancer 3 | — | 4059 |
| | Muscle Enhancer 4 | — | 4060 |
| | Muscle Enhancer 5 | — | 4061 |
| | Muscle Enhancer 6 | — | 4062 |
| | Muscle Enhancer 7 | — | 4063 |
| | Muscle Enhancer 8 | — | 4064 |
| | Muscle Enhancer 9 | — | 4065 |
| | Muscle Enhancer 10 | — | 4066 |
| | Muscle Enhancer 11 | — | 4067 |
| | Muscle Enhancer 12 | — | 4068 |
| | MyoD Enhancer | — | 4069 |
| | Cardiac Muscle Enhancer 1 | — | 4070 |
| | Cardiac Muscle Enhancer 2 | — | 4071 |
| | Cardiac Muscle Enhancer 3 | — | 4072 |
| | Cardiac Muscle Enhancer 4 | — | 4073 |
| | Myoblast Muscle Enhancer 1 | — | 4074 |
| | Myoblast Muscle Enhancer 2 | — | 4075 |
| | Myoblast Muscle Enhancer 3 | — | 4076 |
| | Myoblast Muscle Enhancer 4 | — | 4077 |
| | Myoblast Muscle Enhancer 5 | — | 4078 |
| | Skeletal Muscle Enhancer 1 | — | 4079 |
| | Skeletal Muscle Enhancer 2 | — | 4080 |
| | Skeletal Muscle Enhancer 3 | — | 4081 |
| | Skeletal Muscle Enhancer 4 | — | 4082 |
| | Skeletal Muscle Enhancer 5 | — | 4083 |
| | Skeletal Muscle Enhancer 6 | — | 4084 |
| | Skeletal Muscle Enhancer 7 | — | 4085 |
| | Skeletal Muscle Enhancer 8 | — | 4086 |
| | Skeletal Muscle Enhancer 9 | — | 4087 |
| Protein | CMV | 1-3, 7, 24-33, 44-52, 103-117, 211-214 | 463 |
| promoter | UbC | 4, 34-37, 53, 78, 79-102, 119-155, 207-210, | 464 |
| | | 215, 220 | |
| | EFS | 5, 38-40 | 465 |
| | CMV-s | 6, 41-43 | 466 |
| | CMVd1 | 8 | 467 |
| | CMVd2 | 9 | 468 |
| | miniCMV | 10 | 469 |
| | HSVTK | 11 | 470 |
| | miniTK | 12 | 471 |
| | miniIL2 | 13 | 472 |
| | GRP94 | 14 | 473 |
| | Supercore 1 | 15 | 474 |
| | Supercore 2 | 16 | 475 |
| | Supercore 3 | 17 | 476 |
| | Mecp2 | 18 | 477 |
| | CMVmini | 19 | 478 |
| | CMVmini2 | 20 | 479 |
| | miniCMVIE | 21 | 480 |
| | adML | 22 | 481 |
| | hepB | 23 | 482 |
| | RSV | 54 | 483 |
| | hSyn | 55 | 484 |
| | SV40 | 56 | 485 |
| | hPGK | 57 | 486 |
| | Jet | 58, 72-74 | 487 |
| | Jet + UsP intron | 59, 75-77 | 488 |
| | hRLP30 | 60 | 489 |
| | hRPS18 | 61 | 490 |
| | CBA | 62 | 491 |
| | CBH | 63 | 492 |
| | CMV core | 64 | 493 |
| | U1a | 177, 180, 181, 182 | 2930 |
| | CpG-reduced U1a | 178, 206 | 2907 |
| | CpG-depleted U1a | 179, 205 | 2908 |
| | CpG-reduced U6 | 180 | 2909 |
| | CpG-depleted U6 | 181, 205, 206 | 2910 |
| | CpG-reduced UbC | 184 | 2904 |
| | Strongly CpG-reduced UbC | 185 | 2905 |
| | CpG-depleted UbC | 186 | 2906 |
| | SFCp | — | 2931 |
| | miniSV40 | — | 2932 |
| | pJB42CAT5 | — | 2933 |
| | MLP | — | 2934 |
| | miniEF1α | — | 2935 |
| | hRPL13a | — | 2936 |
| 5′ NLS aa | 1X SV40 NLS | — | 771 |
| sequence | 4X SV40 NLS | 121-123 | 772 |
| | 1X Cmyc NLS | 83, 84, 89-102, 124-131, 135-137, 141-155, | 541 |
| | | 157-174, 177-186, 207-210, 215-220 | |
| | 2X Cmyc NLS | 127-129 | 542 |
| | 4X Cmyc NLS | 130, 131 | 543 |
| | 6X Cmyc NLS | 135-137, 142 | 544 |
| | 1X Nucleoplasmin NLS | 132-134 | 545 |
| | 2X Nucleoplasmin NLS | 138-140 | 546 |
| | 1X Cmyc 1X SV40 NLS | — | 547 |
| | 1X Cmyc 2′ 1X SV40 NLS | — | 548 |
| | 1X Cmyc 2′ NLS | — | 549 |
| | 3X Cmyc 2′ NLS | — | 550 |
| | 4X Cmyc 2′ NLS | — | 551 |
| | 1X CPV NLS 1N | — | 552 |
| | 2X CPV NLS IN | — | 553 |
| | 1X hBOVc NLS 1N | — | 554 |
| | 1X hBOVc NLS 2N | — | 555 |
| | 1X SIRT NLS | — | 556 |
| | 2X SIRT NLS | — | 557 |
| | 1X Cmyc NLS 1X BPSV40 | — | 558 |
| | NLS GGS | | |
| | 1X Cmyc NLS 1X BPSV40 | — | 559 |
| | NLS PPPPG | | |
| | 1X Cmyc NLS 1X BPSV40 | — | 560 |
| | NLS px330 PG | | |
| | 1X Cmyc NLS 1X BPSV40 | — | 561 |
| | NLS (GGGS)2 PG | | |
| | 1X Cmyc NLS 1X BPSV40 | — | 562 |
| | NLS P(GGGS)2 PG | | |
| | 1X Cmyc NLS 1X BPSV40 | — | 563 |
| | NLS alpha PG | | |
| | 1X Cmyc NLS 1X BPSV40 | — | 564 |
| | NLS PG | | |
| | 1X Cmyc GGS 1X SV40 | — | 565 |
| | GGS | | |
| | 1X Cmyc PPP 1X SV40 PG | — | 566 |
| | 1X Cmyc PG | — | 567 |
| | 1X Cmyc (GGGS)3 | — | 568 |
| | 1X Cmyc PPP | — | 569 |
| | 1X Cmyc (GGGS)3 PPP | — | 570 |
| | 1X SV40 PPP | — | 571 |
| | 1X SV40 GGS | — | 572 |
| CasX | CpG-depleted cMycNLS- | 205, 206 | 2916 |
| | Stx491-cMycNLS | | |
| 3′ NLS aa | 1X SV40 NLS | — | 573 |
| sequence | 4X SV40 NLS | 149 | 574 |
| | 6S SV40 NLS | — | 575 |
| | 1X Cmyc NLS | 141, 142, 150, 157-174, 177-186, 207-210 | 576 |
| | 2X Cmyc NLS | 151 | 577 |
| | 4x Cmyc NLS | — | 578 |
| | 6x Cmyc NLS | 152 | 579 |
| | 1X Nucleoplasmin NLS | 119, 122, 125, 128, 130, 133, 136, 139, 153 | 580 |
| | 2X Nucleoplasmin NLS | 120, 123, 126, 129, 131, 134, 137, 140, 154 | 581 |
| | 2x Nucleoplasmin 2x SV40 | 155 | 582 |
| | NLS | | |
| | B19 NLS 1C | — | 583 |
| | BoV NLS 3C | — | 584 |
| | 1X SV40 GS 1X | — | 585 |
| | Nuceloplasmin NLS | | |
| | GP vBPSV40 12aa SV40 | 143 | 586 |
| | NLS | | |
| | (GGGs)2vBPSV40 12aa | — | 587 |
| | SV40 | | |
| | 3′alphahelix vBPSV40 12aa | 144 | 588 |
| | SV40 | | |
| | GP SV40 GGS vBPSV40 | — | 589 |
| | 12aa SV40 | | |
| | GP alpha helix Cmyc NLS | 145 | 590 |
| | GP (GGGS)3 Cmyc NLS | 146 | 591 |
| | GP SV40 PPP Cmyc NLS | 148 | 592 |
| | GP Cmyc NLS | 147 | 593 |
| | TGGGPGGGAAAGSGS- | — | 597 |
| | 1xSV40-GS-Nuc | | |
| | TGGGPGGGAAAGSGS- | — | 599 |
| | 1×SV40-GS | | |
| | PPPlinker 1xSV40 PPPlinker | — | 600 |
| | GGSlinker 1xSV40 | — | 601 |
| | PPPlinker | | |
| | PPPlinker 1xSV40 | — | 602 |
| | GGSlinker 1xSV40 | — | 603 |
| | GGSlinker 1xSV40 | — | 604 |
| | (GGS)3linker | | |
| | GGSlinker 2xSV40 | — | 605 |
| | (GGS)3linker 1xSV40 GGS | — | 606 |
| | 1XSV40 | | |
| | PPP(GGGS)3linker 1xCmyc | — | 609 |
| | PPPlinker 1xCmyc | — | 608 |
| | PPP(GGGS)3linker 1xCmyc | — | 773 |
| PTRE | WPRE1 | 35, 38, 41, 72, 75, 78, 81, 83 | 524 |
| | WPRE2 | 36, 39, 42, 73, 76, 79, 82, 84 | 525 |
| | WPRE3 | 34, 37, 40, 43, 74, 77, 80 | 526 |
| PolyA signal | bGH | 1-23, 32, 33, 35-174, 177-181, 183-186, | 514 |
| | | 207-220 | |
| | hGH | 24 | 515 |
| | hGHshort | 25 | 516 |
| | HSVTK | 26 | 517 |
| | SynPolyA | 27 | 518 |
| | SV40 | 28 | 519 |
| | SV40short | 29 | 520 |
| | bglob | 30 | 521 |
| | bglobshort | 31 | 522 |
| | SV40polyA late | 34 | 523 |
| | CpG-depleted bGH | 182, 205, 206 | 2917 |
| | T7 Tphi | 222 | 3997 |
| | CaMV | 223 | 3998 |
| | RDH1 | 224 | 3999 |
| | Sv40 polyA late | 225 | 4000 |
| RNA | human U6 | 1-31, 34-84, 103-157, 177-179, 182-186, | 494 |
| promoter | | 207, 209, 211-220 | |
| | Human U6 (reverse | 208, 210 | 4001 |
| | complement) | | |
| | H1 | 32, 158 | 495 |
| | 7SK | 33 | 496 |
| | hU6 variant 1 | 85, 89 | 497 |
| | hU6 variant 2 | 86 | 498 |
| | hU6 variant 3 | 87 | 499 |
| | hU6 variant 4 | 88 | 500 |
| | hU6 variant 5 | 90 | 501 |
| | hU6 variant 6 | 91 | 502 |
| | hU6 variant 7 | 92 | 503 |
| | hU6 variant 8 | 93 | 504 |
| | hU6 variant 9 | 94 | 505 |
| | hU6 variant 10 | 95 | 506 |
| | hU6 variant 11 | 96 | 507 |
| | hU6 variant 12 | 97 | 508 |
| | hU6 variant 13 | 98 | 509 |
| | hU6 variant 14 | 99 | 510 |
| | hU6 variant 15 | 100 | 511 |
| | hU6 variant 16 | 101 | 512 |
| | hU6 variant 17 | 102 | 513 |
| | H1 core | 159 | 2688 |
| | H1 core + 7SK hybrid 1 | 160 | 2689 |
| | H1 core + 7SK hybrid 2 | 161 | 2690 |
| | H1 core + 7SK hybrid 3 | 162 | 2691 |
| | H1 core + 7SK hybrid 4 | 163 | 2692 |
| | H1 core + 7SK hybrid 5 | 164 | 2693 |
| | H1 core + 7SK hybrid 6 | 165 | 2694 |
| | H1 core + 7SK hybrid 7 | 166 | 2695 |
| | H1 core + 7SK hybrid 8 | 167 | 2696 |
| | H1 core + 7SK hybrid 9 | 168 | 2697 |
| | H1 core + U6 hybrid 1 | 169 | 2698 |
| | H1 core + U6 hybrid 2 | 170 | 2699 |
| | H1 core + 7SK + U6 hybrid 1 | 171 | 2700 |
| | H1 core + U6 hybrid 3 | 172 | 2701 |
| | H1 core + 7SK + U6 hybrid 2 | 173 | 2702 |
| | H1 core + 7SK + U6 hybrid 3 | 174 | 2703 |
| | hU6 isoform 2 | — | 2704 |
| | hU6 isoform 3 | — | 2705 |
| | hU6 isoform 4 | — | 2706 |
| | hU6 isoform 5 | — | 2707 |
| | hU6-CpG reduced | 180 | 2909 |
| | hU6-CpG reduced | 181 | 2910 |
| | mU6 | — | 2708 |
| | CpG-reduced | — | 2911 |
| | hU6 Isoform 2 | | |
| | CpG-depleted hU6 Isoform 2 | — | 2912 |
| | CpG-depleted hU6 Isoform 3 | — | 2913 |
| | CpG-depleted hU6 Isoform 4 | — | 2914 |
| | CpG-depleted hU6 Isoform 5 | — | 2915 |
| 3′ ITR | AAV2 ITR | 1-174, 177-186 | 424 |
| | CpG-depleted 3′ ITR | — | 2919 |

[1415] The first rows of Table 65 provide sequences of shRNAs 1-12. These shRNA sequences were incorporated at the 5′ end of the siAAV transgene that was used to transfect the packaging cells (Examples 17 & 18). The shRNA constructs are labeled 1-12, and 29 in the second column. The following rows list the transgene components in the order in which they are arranged in the transgene. Constructs 17 to 23 have the shRNA in separate plasmids. These are not appended to the siAAV transgene but were transfected as separate plasmids in the packaging cell line. STALL 24-28 are constructs that have the self-limiting segments.

TABLE 65
shRNA and siAAV Constructs

| | SiAAV | | SEQ |
|---|---|---|---|
| Category | construct ID | Component | ID NO: |
| EFGP 3′ | 1 | EF1a-EGFP-shRNA1a | 2937 |
| UTR | 2 | EF1a-EGFP-shRNA2a | 2938 |
| shRNA | 3 | EF1a-EGFP-shRNA3a | 2939 |
| Backbones | 4 | EF1a-EGFP-shRNA4a | 2940 |
| | 5 | EF1a-EGFP-shRNA5a | 2941 |
| | 6 | EF1a-EGFP-shRNA6a | 2942 |
| | 7 | EF1a-EGFP-shRNA7a | 2943 |
| | 8 | EF1a-EGFP-shRNA8a | 2944 |
| | 9 | EF1a-EGFP-shRNA9a | 2945 |
| | 10 | EF1a-EGFP-shRNA10a | 2946 |
| | 11 | EF1a-EGFP-shRNA11a | 2947 |
| | 12 | EF1a-EGFP-shRNA12a | 2948 |
| | 13 | BB59.shRNA8.shRNA8 | 2949 |
| | 14 | BB59.shRNA8.shRNA11 | 798 |
| | 15 | BB59.shRNA8.shRNA12 | 799 |
| | 16 | BB59.shRNA11.shRNA12 | 800 |
| | 29 | EF1a-EGFP-DEST | 2950 |
| | 89, 90, 141 | U6-shRNA8a | 2951 |
| U6 + | 87, 88, 142 | U6-shRNA8a Scramble | 2952 |
| shRNA8 | 77, 78 | U6-shRNA8b | 2953 |
| Scaffold | 75, 76 | U6-shRNA8b Scramble | 2954 |
| Variation | 85, 86 | U6-shRNA8c | 2955 |
| Silencing | 83, 84 | U6-shRNA8c Scramble | 2956 |
| Backbones | 81, 82 | U6-shRNA8d | 2957 |
| | 79, 80 | U6-shRNA8d Scramble | 2958 |
| Stacked | 91, 104 | U6-shRNA8a 7SK shRNA8b | 2959 |
| shRNA | 92, 105 | U6-shRNA8a H1 shRNA8b | 2960 |
| Backbones | 93, 106, 143 | U6-shRNA8a 7SK shRNA8c | 2961 |
| | 94, 107, 144 | U6-shRNA8a H1 shRNA8c | 2962 |
| | 95, 108 | U6-shRNA8a 7SK-shRNA8b | 2963 |
| | | H1 shRNA8c | |
| | 96, 109 | U6-shRNA8a 7SK-shRNA8cH1 | 2964 |
| | | shRNA8b | |
| | 97, 110 | mU6-shRNA8a | 2965 |
| | 98, 111 | mU6-shRNA8a 7SK shRNA8b | 2966 |
| | 99, 112 | mU6-shRNA8a H1 shRNA8b | 2967 |
| | 100, 113 | mU6-shRNA8a 7SK shRNA8c | 2968 |
| | 101, 114 | mU6-shRNA8a H1 shRNA8c | 2969 |
| | 102, 115 | mU6-shRNA8a | 2970 |
| | | 7SK shRNA8b H1 shRNA8c | |
| | 103, 116 | mU6-shRNA8a | 2971 |
| | | 7SK shRNA8c H1 shRNA8b | |
| iRNA and | 122 | U6-iRNA1 | 2972 |
| dgRNA | 123 | U6-iRNA2 | 2973 |
| Backbones | 124 | U6-iRNA3 | 2974 |
| | 125 | U6-iRNA4 | 2975 |
| | 130 | U6-174NT | 2976 |
| | 131 | U6-174NS | 2977 |
| | 132 | U6-234NT | 2978 |
| | 133 | U6-234NS | 2979 |
| | 134 | U6-235NT | 2980 |
| | 135 | U6-235NS | 2981 |

TABLE 66
Sequences of AAV transgenes and standalone plasmids

| Category | Construct ID | Component | SEQ ID NO |
|---|---|---|---|
| AAV | 1-12, 29 | 5′ ITR | 423 |
| transgenes | | Buffer seq | 788 |
| * and | | CMV Enhancer + Promoter | 527 |
| standalone | | Buffer seq | 789 |
| Plasmids | | Kozak | NA |
| | | Start codon | NA |
| | | NLS | 790 |
| | | linker | NA |
| | | CasX 491 Protein | 791 |
| | | linker | NA |
| | | NLS | 792 |
| | | HA tag | 793 |
| | | linker + stop | NA |
| | | Buffer seq | 794 |
| | | poly A | 514 |
| | | Buffer seq | NA |
| | | U6 promoter | 494 |
| | | buffer seq | NA |
| | | Scaffold | 691 |
| | | Spacer | 795 |
| | | Buffer seq | 796 |
| | | 3′ ITR | 424 |
| shRNA | 13 | BB59.shRNA8.shRNA8 | 797 |
| backbones | | | |
| shRNA | 17 | EF1a.eGFP.shRNA8 | 801 |
| standalone | 18 | EF1a.eGFP.shRNA11 | 802 |
| plasmids | 19 | EF1a.eGFP.shRNA12 | 803 |
| | 20 | EF1a.eGFP.shRNA8.shRNA8 | 804 |
| | 21 | EF1a.eGFP.shRNA8.shRNA11 | 805 |
| | 22 | EF1a.eGFP.shRNA8.shRNA12 | 806 |
| | 23 | EF1a.eGFP.shRNA11.shRNA12 | 807 |
| STALLs | 24-28 | 5′ ITR | 423 |
| | | Protein Promoter | 527 |
| | 24 | STALL-TTC | 808 |
| | 25 | STALL-CTC | 809 |
| | 26 | STALL-ATC | 810 |
| | 27 | STALL-GTC | 811 |
| | 28 | STALL-GGGN | 812 |
| | 24-28 | Protein | 791 |
| | | PolyA Signal Sequence | 514 |
| | | RNA Promoter | 494 |
| | | Scaffold | 691 |
| | | Spacer | 462 |
| | | 3′ ITR | 424 |
| Scaffolds | 31-47 | 5′ITR | 423 |
| | | buffer seq | 788 |
| | | enhancer | 813 |
| | | promoter | 493 |
| | | buffer seq | 814 |
| | | kozak | 829 |
| | | start codon | NA |
| | | 5′NLS | 790 |
| | | 5′linker | NA |
| | | CasX 491 Protein | 791 |
| | | 3′NLS linker | NA |
| | | 3′NLS | 792 |
| | | tag | 793 |
| | | linker | NA |
| | | buffer seq | 794 |
| | | polyA | 514 |
| | | polIII prom | 494 |
| | | buffer | NA |
| | 31 | Scaffold 174 | 691 |
| | 34 | Scaffold 221 | 815 |
| | 35 | Scaffold 222 | 816 |
| | 36 | Scaffold 223 | 817 |
| | 37 | Scaffold 224 | 818 |
| | 38 | Scaffold 225 | 819 |
| | 39 | Scaffold 229 | 820 |
| | 40 | Scaffold 230 | 821 |
| | 41 | Scaffold 231 | 822 |
| | 42 | Scaffold 232 | 823 |
| | 43 | Scaffold 233 | 824 |
| | 44 | Scaffold 234 | 825 |
| | 45 | Scaffold 235 | 698 |
| | 46 | Scaffold 236 | 827 |
| | 47 | Scaffold 237 | 828 |
| | 31-47 | Spacer | 462 |
| | | Buffer | 796 |
| | | 3′ITR | 424 |
| Double | 48-52 | 5′ ITR | 423 |
| guides | | Protein Promoter | 527 |
| | | Protein | 791 |
| | | PolyA Signal Sequence | 514 |
| | 48 | RNA Promoter 1 | 494 |
| | | RNA Promoter 2 | 494 |
| | | Scaffold 1 | 691 |
| | | Scaffold 2 | 691 |
| | | Spacer 1 | 537 |
| | | Spacer 2 | 829 |
| | 49 | RNA Promoter 1 | 494 |
| | | RNA Promoter 2 | 494 |
| | | Scaffold 1 | 691 |
| | | Scaffold2 | 691 |
| | | Spacer 1 | 829 |
| | | Spacer 2 | 830 |
| | 50 | RNA Promoter 1 | 494 |
| | | RNA Promoter 2 | 494 |
| | | Scaffold 1 | 691 |
| | | Scaffold 2 | 691 |
| | | Spacer 1 | 462 |
| | | Spacer 2 | 462 |
| | 51 | RNA Promoter 1 | 494 |
| | | RNA Promoter 2 | 494 |
| | | Scaffold 1 | 691 |
| | | Scaffold 2 | 691 |
| | | Spacer 1 | 462 |
| | | Spacer 2 | 536 |
| | 52 | RNA Promoter 1 | 494 |
| | | RNA Promoter 2 | 494 |
| | | Scaffold 1 | 69 |
| | | Scaffold 2 | 691 |
| | | Spacer 1 | 537 |
| | | Spacer 2 | 462 |
| | 48-52 | 3′ ITR | 424 |
| RNA | 54-73 | 5′ ITR | 423 |
| promoters | | buffer seq | 788 |
| | | promoter | 464 |
| | | stuffer + kozak | 831 |
| | | start codon | NA |
| | | 5′ NLS | 832 |
| | | 5′ linker | |
| | | CasX 491 Protein | 791 |
| | | 3′ NLS linker | NA |
| | | 3′ NLS | 792 |
| | | tag + stop codon | 833 |
| | | buffer seq | 794 |
| | | polyA | 514 |
| | | buffer seq | NA |
| | 54 | RNA promoter 1 | 497 |
| | 55 | RNA promoter 2 | 498 |
| | 56 | RNA promoter 3 | 499 |
| | 57 | RNA promoter 4 | 500 |
| | 58 | RNA promoter 5 | 497 |
| | 59 | RNA promoter 6 | 501 |
| | 60 | RNA promoter 7 | 502 |
| | 61 | RNA promoter 8 | 503 |
| | 62 | RNA promoter 9 | 504 |
| | 63 | RNA promoter 10 | 505 |
| | 64 | RNA promoter 11 | 506 |
| | 65 | RNA promoter 12 | 507 |
| | 66 | RNA promoter 13 | 508 |
| | 67 | RNA promoter 14 | 509 |
| | 68 | RNA promoter 15 | 510 |
| | 69 | RNA promoter 16 | 511 |
| | 70 | RNA promoter 17 | 512 |
| | 71 | RNA promoter 18 | 513 |
| | 72 | H1 | 495 |
| | 73 | 7SK | 496 |
| | 54-73 | buffer | NA |
| | | scaffold | 691 |
| | | spacer | 462 |
| | | buffer | 796 |
| | | 3′ ITR | 424 |
| Silencing | 73 | 5′ ITR | 423 |
| Backbones + | | buffer | 834 |
| Other | | Protein Promoter | 836 |
| Construct | | STALL + KOZAK | 837 |
| Transgenes | | start codon | NA |
| ONLY | | 5′ NLS | 838 |
| | | 5′ linker | NA |
| | | CasX 491 Protein | 791 |
| | | 3′ NLS linker | NA |
| | | 3′ NLS | 839 |
| | | stop codon | NA |
| | | STALL | 840 |
| | | PolyA Signal Sequence | 514 |
| | | buffer | NA |
| | | RNA Promoter | 494 |
| | | buffer | NA |
| | | Scaffold | 698 |
| | | Spacer | 841 |
| | | buffer | 796 |
| | | 3′ ITR | 424 |
| | 74 | 5′ ITR | 423 |
| | | buffer | 834 |
| | | Protein Promoter | 835 |
| | | buffer + kozak | 2982 |
| | | start codon | NA |
| | | 5′ NLS | 838 |
| | | 5′ linker | NA |
| | | CasX 535 Protein | 752 |
| | | 3′ NLS linker | NA |
| | | 3′ NLS | 839 |
| | | stop codon | NA |
| | | buffer | 794 |
| | | PolyA Signal Sequence | 514 |
| | | buffer | NA |
| | | RNA Promoter | 494 |
| | | buffer | NA |
| | | Scaffold | 698 |
| | | Spacer | 841 |
| | | buffer | 796 |
| | | 3′ ITR | 424 |
| | 30, | 5′ ITR | 423 |
| | 75, 77, 79, 81, 83, | buffer seq | 788 |
| | 85, 87, 89, 120, | promoter | 464 |
| | 126-127 | buffer seq | 789 |
| | | kozak | NA |
| | | start codon | NA |
| | | 5′ NLS | 790 |
| | | 5′ linker | NA |
| | | CasX 491 Protein | 791 |
| | | 3′ NLS linker | NA |
| | | 3′ NLS | 792 |
| | | tag | 793 |
| | | linker-stop codon | NA |
| | | buffer seq | 794 |
| | | polyA | 514 |
| | | buffer seq | NA |
| | | polIII prom | 494 |
| | | buffer | NA |
| | | scaffold | 691 |
| | | spacer | 462 |
| | | buffer | 796 |
| | | 3′ITR | 424 |
| | 32 | 5′ ITR | 423 |
| | | buffer seq | 788 |
| | | promoter | 464 |
| | | buffer seq + STALL site | 842 |
| | | kozak | NA |
| | | start codon | NA |
| | | 5′ NLS | 832 |
| | | 5′ linker | NA |
| | | CasX 491 Protein | 791 |
| | | 3′ NLS linker | NA |
| | | 3′ NLS | 792 |
| | | tag | 793 |
| | | linker-stop codon | NA |
| | | buffer seq + STALL site | 843 |
| | | polyA | 514 |
| | | buffer seq | NA |
| | | polIII prom | 494 |
| | | buffer | NA |
| | | scaffold | 691 |
| | | spacer | 462 |
| | | buffer | 796 |
| | | 3′ ITR | 424 |
| | 33, | 5′ ITR | 423 |
| | 76, 78, 80, 82, 84, | buffer seq | 788 |
| | 86, 88, 90, | promoter | 464 |
| | 91-103 | buffer seq + STALL site | 842 |
| | | kozak | NA |
| | | start codon | NA |
| | | 5′ NLS | 832 |
| | | 5′ linker | NA |
| | | CasX 491 Protein | 791 |
| | | 3′ NLS linker | NA |
| | | 3′ NLS | 792 |
| | | tag | 793 |
| | | linker-stop codon | NA |
| | | buffer seq | 794 |
| | | polyA | 514 |
| | | buffer seq | NA |
| | | polIII prom | 494 |
| | | buffer | NA |
| | | scaffold | 691 |
| | | spacer | 462 |
| | | buffer | 796 |
| | | 3′ITR | 424 |
| Silencing | 104-119, 138- | 5′ ITR | 423 |
| Backbone | 139, 140, | Buffer seq | 788 |
| Transgenes | 146, 147 | promoter | 464 |
| Set 2 | | buffer seq | 789 |
| | 104-119, | STALL site | 2983 |
| | 138-139 | | |
| | 146 | STALL site | 2984 |
| | 104-119, 138- | kozak | NA |
| | 139, 140, | start codon | NA |
| | 146, 147 | 5′ NLS | 838 |
| | | 5′ linker | NA |
| | | CasX 491 Protein | 791 |
| | | 3′ NLS linker | NA |
| | | 3′ NLS | 2985 |
| | | linker-stop codon | NA |
| | | buffer seq | 794 |
| | | polyA | 514 |
| | | buffer seq | NA |
| | | polIII prom | 661 |
| | | buffer | NA |
| | | scaffold | 698 |
| | | spacer | 2920 |
| | | buffer | 796 |
| | | 3′ITR | |
| 2xSTALL | 136 | 5′ ITR | 423 |
| Constructs | (Same as 32) | buffer seq | 788 |
| In Vivo + | | promoter | 464 |
| Decoy | | 5′ buffer seq + STALL site | 842 |
| gRNA | | kozak | NA |
| | | start codon | NA |
| | | 5′ NLS | 832 |
| | | 5′ linker | NA |
| | | CasX 491 Protein | 791 |
| | | 3′ NLS linker | NA |
| | | 3′ NLS | 792 |
| | | tag | 793 |
| | | linker-stop codon | NA |
| | | 3′ buffer seq + STALL site | 843 |
| | | polyA | 514 |
| | | buffer seq | NA |
| | | polIII prom | 494 |
| | | buffer | NA |
| | | scaffold | 691 |
| | | spacer | 462 |
| | | buffer | 796 |
| | | 3′ ITR | 424 |
| | 137 | 5′ buffer seq + STALL site | 2986 |
| | | 3′ buffer seq + STALL site | 2987 |
| | 121-125, | 5′ buffer seq + STALL site | 2988 |
| | 128-135 | 3′ buffer seq + STALL site | 2989 |
| shRNA | 141-145 | pRepCap | 2990 |
| pRepCap | | | |
| shRNA | 167 | pRepCap | 4109 |
| pRepCap | | | |

[1416] Table 67 provides exemplary full-length siAAV constructs with one or two STALL sites. In Table 67, the spacer sequences of the sgRNA and the STALL sites are shown as wildcards that may indicate any nucleobase.

TABLE 67
DNA sequences of exemplary siAAV constructs
with one or two STALL sites

| | | SEQ ID NO (full-length |
|---|---|---|
| Number of STALL sites | STALL site PAM | construct sequence) |
| 1 | ATCN | 4151 |
| 1 | CTCN | 4152 |
| 1 | GTCN | 4153 |
| 2 | ATCN | 4154 |
| 2 | CTCN | 4155 |
| 2 | GTCN | 4156 |

1-87. (canceled)

88. A self-inactivating recombinant vector (SIRV) comprising a polynucleotide comprising:
a) one or more packaging components, wherein the packaging component comprises AAV 5′ and 3′ inverted terminal repeats (ITR);
b) a sequence encoding a Class 2 Type V protein comprising a single RNA-guided RuvC domain;
c) a first promoter operably linked to the sequence encoding the Class 2 Type V protein;
d) a sequence encoding a first guide RNA (gRNA) comprising a scaffold sequence linked to a targeting sequence that is complementary to and capable of hybridizing with: 1) a target nucleic acid of a cell to be modified; and 2) one or more self-inactivating segments incorporated in the polynucleotide;
e) a second promoter sequence operably linked to the sequence encoding the first gRNA; and
f) one or more self-inactivating segments comprising a protospacer adjacent motif (PAM) sequence and a polynucleotide sequence capable of being bound and cleaved by a ribonuclear protein complex (RNP) comprising the Class 2 Type V protein and the first gRNA,
wherein the one or more self-inactivating segments of the polynucleotide are located:
i) 5′ or 3′ adjacent to or within the sequence encoding the Class 2 Type V protein;
ii) 5′ or 3′ adjacent to or within a Kozak sequence located between the first promoter and the sequence encoding the Class 2 Type V protein;
iii) 5′ or 3′ adjacent to or within to the first promoter sequence;
iv) 5′ or 3′ adjacent to or within the second promoter sequence;
v) 3′ downstream of the transcriptional start site for the sequence encoding the Class 2 Type V protein;
vi) within one or more inserted introns in the polynucleotide encoding the Class 2 Type V protein;
vii) at the 3′ end of the polynucleotide encoding the Class 2 Type V protein, between a stop codon and poly(A) termination site for the Class2 Type V protein; or
viii) any combination of (i)-(vii); and
wherein the PAM sequence of the one or more self-inactivating segments:
1) is different by at least one nucleotide from the PAM sequence of the target nucleic acid of the cell to be modified; and
2) promotes less efficient cleavage or rate of cleavage of the self-inactivating segment by the RNP compared to the target nucleic acid of the cell to be modified; and
wherein cleavage by the RNP of the self-inactivating segment of the polynucleotide in a cell transduced or transfected with the SIRV results in reduced or eliminated expression of the Class 2 Type V protein or the gRNA encoded by the polynucleotide.

89. The SIRV of claim 88, wherein the self-inactivating segment comprises a sequence corresponding to any 15-21 nucleotide portion of the target nucleic acid sequence that is 3′ adjacent to a PAM sequence recognized by an RNP of the Class 2 Type V protein and the first gRNA.

90. The SIRV of claim 88, wherein:
a) if the PAM sequence of the target nucleic acid of the cell to be modified is TTC and the PAM preference of the Class 2 Type V protein is TTC, then the PAM sequence of the one or more self-inactivating segments is selected from the group consisting of ATC, CTC, TTT, GTT, and GTC;
b) if the PAM sequence of the target nucleic acid of the cell to be modified is ATC and the PAM preference of the Class 2 Type V protein is TTC, then the PAM sequence of the one or more self-inactivating segments is selected from the group consisting of CTC, TTT, GTT, and GTC;
c) if the PAM sequence of the target nucleic acid of the cell to be modified is CTC and the PAM preference of the Class 2 Type V protein is TTC, then the PAM sequence of the one or more self-inactivating segments is TTT, GTT, ATC, or GTC;
d) if the PAM sequence of the target nucleic acid of the cell to be modified is ATC and the PAM preference of the Class 2 Type V protein is ATC, then the PAM sequence of the one or more self-inactivating segments is selected from the group consisting of TTC, CTC, TTT, GTT, and GTC;
e) if the PAM sequence of the target nucleic acid of the cell to be modified is CTC and the PAM preference of the Class 2 Type V protein is ATC, then the PAM sequence of the one or more self-inactivating segments is selected from the group consisting of TTC, TTT, GTT, and GTC;
f) if the PAM sequence of the target nucleic acid of the cell to be modified is GTC and the PAM preference of the Class 2 Type V protein is ATC, then the PAM sequence of the one or more self-inactivating segments is TTC, TTT, CTC, or GTT;
g) if the PAM sequence of the target nucleic acid of the cell to be modified is GTC and the PAM preference of the Class 2 Type V protein is GTC, then the PAM sequence of the one or more self-inactivating segments is selected from the group consisting of ATC, CTC, TTT, GTT, and TTC;
h) if the PAM sequence of the target nucleic acid of the cell to be modified is GTC and the PAM preference of the Class 2 Type V protein is ATC, then the PAM sequence of the one or more self-inactivating segments is selected from the group consisting of TTC, TTT, GTT, and CTC;
i) if the PAM sequence of the target nucleic acid of the cell to be modified is CTC and the PAM preference of the Class 2 Type V protein is GTC, then the PAM sequence of the one or more self-inactivating segments is TTC, TTT, ATC, or GTT;
j) if the PAM sequence of the target nucleic acid of the cell to be modified is CTC and the PAM preference of the Class 2 Type V protein is CTC, then the PAM sequence of the one or more self-inactivating segments is selected from the group consisting of ATC, GTC, TTT, GTT, and TTC;
k) if the PAM sequence of the target nucleic acid of the cell to be modified is ATC and the PAM preference of the Class 2 Type V protein is CTC, then the PAM sequence of the one or more self-inactivating segments is selected from the group consisting of GTC, TTT, GTT, and TTC; or
l) if the PAM sequence of the target nucleic acid of the cell to be modified is GTC and the PAM preference of the Class 2 Type V protein is CTC, then the PAM sequence of the one or more self-inactivating segments is TTC, TTT, ATC, or GTT.

91. The SIRV of claim 88, wherein the one or more self-inactivating segments each have between about 1 to about 5 bases that are not complementary to corresponding positions in the targeting sequence of the first gRNA.

92. The SIRV of claim 88, wherein the percent cleavage by the RNP of the self-inactivating segments of the polynucleotide in a cell transfected or transduced with the SIRV is at least about 70%, less than the cleavage of the target nucleic acid in the cell in a timed in vitro cell-based assay, when assayed under comparable conditions, and wherein the time to achieve cleavage by the RNP of the self-inactivating segments of the polynucleotide in a cell transfected or transduced with the SIRV is delayed, relative to the time to achieve 90% editing of the target nucleic acid in the cell by at least about 9 days, when assayed in an in vitro assay under comparable conditions.

93. The SIRV of claim 88, wherein cleavage by the RNP of the self-inactivating segments of the polynucleotide in a cell transfected or transduced with the SIRV has a k_{cleave} rate that is at least about 2-fold less than the k_{cleave} rate of the target nucleic acid in an in vitro cell-based assay, when assayed under comparable conditions.

94. The SIRV of claim 88, wherein the Class 2 Type V protein further comprises one or more nuclear localization signals (NLS) located at or near the N-terminus and/or at or near the C-terminus of the Class 2 Type V protein.

95. The SIRV of claim 88, wherein the Class 2 Type V protein is a CasX protein selected from the group of sequences consisting of SEQ ID NOs: 1-3, 49-321 and 2356-2488, or a sequence having at least about 70% identity thereto.

96. The SIRV of claim 88, wherein the first gRNA has a scaffold comprising a sequence selected from the group of sequences consisting of SEQ ID NOS: 2101-2331, 3992-3995, and 4028 or a sequence having at least about 70% identity thereto, and wherein the first gRNA comprises a targeting sequence having 15 nucleotides, 16 nucleotides, 17, nucleotides, 18 nucleotides, 19 nucleotides, or 20 nucleotides.

97. A self-inactivating viral-derived particle comprising:
a) a viral capsid derived from an AAV serotype selected from the group consisting of AAV1, AAV2, AAV3, AAV4, AAV5, AAV6, AAV7, AAV8, AAV9, AAV10, AAV11, AAV12, AAV 44.9, AAV 9.45, AAV 9.61, AAV-Rh74, AAVRh10, and chimeras thereof;
b) 5′ and 3′ AAV ITR packaging components selected from the same serotype as the AAV capsid; and
c) the SIRV of claim 88.

98. A self-inactivating recombinant vector (SIRV) comprising a polynucleotide comprising:
a) one or more packaging components, wherein the packaging component is an AAV 5′ and 3′ inverted terminal repeat (ITR);
b) a sequence encoding a Class 2 Type V protein;
c) a first promoter operably linked to the sequence encoding the Class 2 Type V protein;
d) a sequence encoding a first guide RNA (gRNA) comprising a scaffold sequence and a linked targeting sequence that is complementary to a target nucleic acid of a cell to be modified;
e) a second promoter sequence operably linked to the sequence encoding the first gRNA;
and one or more of:
f) a sequence encoding a second gRNA comprising a targeting sequence complementary to both a target nucleic acid of a cell to be modified and to one or more self-inactivating segments of the SIRV, wherein the second gRNA comprises a scaffold sequence identical to the scaffold sequence of the first gRNA, wherein:
1) the sequence of the one or more self-inactivating segments is different by one or more nucleotides from the sequence of the target nucleic acid of the cell to be modified and promotes less efficient cleavage or rate of cleavage of the self-inactivating segment by the RNP compared to the target nucleic acid of the cell to be modified; and
2) the targeting sequence of the second gRNA is complementary to different or overlapping regions of the target nucleic acid sequence compared to the targeting sequence of the first gRNA;
g) a sequence encoding a second gRNA comprising a targeting sequence complementary to the one or more self-inactivating segments, the second gRNA comprising a scaffold sequence different from the scaffold sequence of the first gRNA, wherein the second gRNA promotes less efficient editing and/or cleavage by an RNP comprising the Class 2 Type V protein and the second gRNA compared to an RNP comprising the Class 2 Type V protein and the first gRNA;
h) a sequence encoding a second gRNA comprising a targeting sequence complementary to both a target nucleic acid of a cell to be modified and to one or more self-inactivating segments of the SIRV, wherein the second gRNA comprises a scaffold sequence identical to the scaffold sequence of the first gRNA, wherein:
1) the PAM sequence of the one or more self-inactivating segments is different by at least one nucleotide from the PAM sequence of the target nucleic acid of the cell to be modified and promotes less efficient cleavage or rate of cleavage of the self-inactivating segment by the RNP compared to the target nucleic acid of the cell to be modified; and
2) the targeting sequence of the second gRNA is complementary to different or overlapping regions of the target nucleic acid sequence compared to the targeting sequence of the first gRNA;
and/or
i) a third promoter sequence operably linked to the sequence encoding the second gRNA, wherein the third promoter sequence is different from the second promoter sequence and is less efficient at initiating transcription of the second gRNA compared to the second promoter initiating transcription of the first gRNA;
wherein the polynucleotide comprises one or more self-inactivating segments comprising a protospacer adjacent motif (PAM) sequence and a polynucleotide sequence capable of being bound and cleaved by a ribonuclear protein complex (RNP) of the Class 2 Type V protein and the second gRNA, and
wherein the one or more self-inactivating segments of the polynucleotide are located:
1) 5′ or 3′ adjacent to or within the sequence encoding the Class 2 Type V protein;
2) 5′ or 3′ adjacent to or within a Kozak sequence located between the first promoter and the sequence encoding the Class 2 Type V protein;
3) 5′ or 3′ adjacent to or within to the first promoter sequence;
4) 5′ or 3′ adjacent to or within the second promoter sequence;
5) 5′ or 3′ adjacent to or within the third promoter sequence;
6) 3′ downstream of the transcriptional start site for the sequence encoding the Class 2 Type V protein;
7) within one or more inserted introns in the sequence encoding the Class 2 Type V protein;
8) at the 3′ end of the polynucleotide encoding the Class 2 Type V protein, between a stop codon and poly(A) termination site of the sequence encoding the Class 2 Type V; or
9) in any combination of (1)-(8);
and wherein cleavage of the self-inactivating segments in a cell transduced or transfected with the SIRV by the RNP of the Class 2 Type V protein and the second gRNA results in reduced or eliminated expression of the Class 2 Type V protein or the gRNA encoded by the polynucleotide.

99. The SIRV of claim 98, comprising components (a)-(f), and (i).

100. The SIRV of claim 98, comprising components (a)-(e), (g), and (i).

101. The SIRV of claim 98, comprising components (a)-(e), (h) and (i).

102. The SIRV of claim 98, wherein the self-inactivating segment comprises a 15-21 nucleotide sequence complementary to the targeting sequence of the second gRNA and that is 3′ adjacent to a PAM sequence recognized by an RNP of the Class 2 Type V protein and the second gRNA.

103. The SIRV of claim 98, wherein the PAM sequence of the one or more self-inactivating segments:
a) is different from the PAM sequence of the target nucleic acid of the cell to be modified; and
b) promotes less efficient cleavage or rate of cleavage of the self-inactivating segment by the RNP of the Class 2 Type V protein and the second gRNA compared to the PAM of the target nucleic acid of the cell to be modified.

104. The SIRV of claim 103, wherein:
a) if the PAM sequence of the target nucleic acid of the cell to be modified is TTC and the PAM preference of the Class 2 Type V protein is TTC, then the PAM sequence of the one or more self-inactivating segments is selected from the group consisting of ATC, CTC, TTT, GTT, and GTC;
b) if the PAM sequence of the target nucleic acid of the cell to be modified is ATC and the PAM preference of the Class 2 Type V protein is TTC, then the PAM sequence of the one or more self-inactivating segments is selected from the group consisting of CTC, TTT, GTT, and GTC;
c) if the PAM sequence of the target nucleic acid of the cell to be modified is CTC and the PAM preference of the Class 2 Type V protein is TTC, then the PAM sequence of the one or more self-inactivating segments is GTC, TTT, ATC, or GTT;
d) if the PAM sequence of the target nucleic acid of the cell to be modified is ATC and the PAM preference of the Class 2 Type V protein is ATC, then the PAM sequence of the one or more self-inactivating segments is selected from the group consisting of TTC, CTC, TTT, GTT, and GTC;
e) if the PAM sequence of the target nucleic acid of the cell to be modified is CTC and the PAM preference of the Class 2 Type V protein is ATC, then the PAM sequence of the one or more self-inactivating segments is selected from the group consisting of TTC, TTT, GTT, and GTC;
f) if the PAM sequence of the target nucleic acid of the cell to be modified is GTC and the PAM preference of the Class 2 Type V protein is ATC, then the PAM sequence of the one or more self-inactivating segments is TTC, TTT, CTC, or GTT;
g) if the PAM sequence of the target nucleic acid of the cell to be modified is GTC and the PAM preference of the Class 2 Type V protein is GTC, then the PAM sequence of the one or more self-inactivating segments is selected from the group consisting of ATC, CTC, TTT, GTT, and TTC;
h) if the PAM sequence of the target nucleic acid of the cell to be modified is GTC and the PAM preference of the Class 2 Type V protein is ATC, then the PAM sequence of the one or more self-inactivating segments is selected from the group consisting of TTC, TTT, GTT, and CTC;
i) if the PAM sequence of the target nucleic acid of the cell to be modified is CTC and the PAM preference of the Class 2 Type V protein is GTC, then the PAM sequence of the one or more self-inactivating segments is TTC, TTT, ATC, or GTT;
j) if the PAM sequence of the target nucleic acid of the cell to be modified is CTC and the PAM preference of the Class 2 Type V protein is CTC, then the PAM sequence of the one or more self-inactivating segments is selected from the group consisting of ATC, GTC, TTT, GTT, and TTC;
k) if the PAM sequence of the target nucleic acid of the cell to be modified is ATC and the PAM preference of the Class 2 Type V protein is CTC, then the PAM sequence of the one or more self-inactivating segments is selected from the group consisting of GTC, TTT, GTT, and TTC; or
l) if the PAM sequence of the target nucleic acid of the cell to be modified is GTC and the PAM preference of the Class 2 Type V protein is CTC, then the PAM sequence of the one or more self-inactivating segments is TTC, TTT, ATC, or GTT.

105. The SIRV of claim 98, wherein the one or more self-inactivating segment sequences each have between 1 to 5 bases that are not complementary to corresponding positions in the targeting sequence of the second gRNA.

106. The SIRV of claim 98, wherein the RNP of the Class 2 Type V protein and second gRNA exhibit less efficient cleavage of the self-inactivating segment compared to the cleavage of the target nucleic acid of the cell by the RNP of the Class 2 Type V protein and first gRNA.

107. The SIRV of claim 98, wherein the Class 2 Type V protein further comprises one or more nuclear localization signals (NLS).

108. The SIRV of claim 98, wherein the Type V protein is a CasX protein selected from the group consisting of SEQ ID NOs: 1-3 and 49-321 and 2356-2488, or a sequence having at least about 70% sequence identity thereto, wherein the CasX protein is capable of forming a ribonuclear protein complex (RNP) with the first gRNA and the second gRNA upon expression in a cell transduced or transfected with the SIRV, and wherein the RNP of the CasX protein and the first gRNA is capable of cleaving the target nucleic acid and wherein the RNP of the CasX protein and the second gRNA is capable of cleaving the self-inactivating segment, and wherein the RNP of the CasX protein and the second gRNA exhibit a cleavage rate of the self-inactivating segments that is less efficient compared to the cleavage or rate of cleavage of the target nucleic acid by an RNP of the CasX protein and the first gRNA.

109. The SIRV of claim 98, wherein the second guide comprises a sequence selected from the group consisting of SEQ ID NO: 2101-2238 and the first guide comprises a sequence selected from the group consisting of SEQ ID NOS: 2276-2296.

110. The SIRV of claim 98, wherein the first and second gRNA each comprise a targeting sequence having 15 nucleotides, 16 nucleotides, 17, nucleotides, 18 nucleotides, 19 nucleotides, or 20 nucleotides.

111. A self-inactivating viral-derived particle comprising:
a) a viral capsid derived from an AAV serotype selected from the group consisting of AAV1, AAV2, AAV3, AAV4, AAV5, AAV6, AAV7, AAV8, AAV9, AAV10, AAV11, AAV12, AAV 44.9, AAV 9.45, AAV 9.61, AAV-Rh74, AAVRh10, and chimeras thereof;
b) 5′ and 3′ AAV ITR packaging components selected from the same serotype as the AAV capsid; and
c) the SIRV of claim 98.

112. A polynucleotide encoding an SIRV, wherein the polynucleotide comprises a sequence selected from the group consisting of SEQ ID NOs 4151-4156, or a sequence having at least about 70% sequence identity thereto.

113. A method of modifying a target nucleic acid sequence in a cell, comprising transfecting the cell with a SIRV comprising a polynucleotide comprising:
a) one or more packaging components, wherein the packaging component comprises AAV 5′ and 3′ inverted terminal repeats (ITR);
b) a sequence encoding a Class 2 Type V protein comprising a single RNA-guided RuvC domain;
c) a first promoter operably linked to the sequence encoding the Class 2 Type V protein;
d) a sequence encoding a first guide RNA (gRNA) comprising a scaffold sequence linked to a targeting sequence that is complementary to and capable of hybridizing with: 1) a target nucleic acid of a cell to be modified; and 2) one or more self-inactivating segments incorporated in the polynucleotide;
e) a second promoter sequence operably linked to the sequence encoding the first gRNA; and
f) one or more self-inactivating segments comprising a protospacer adjacent motif (PAM) sequence and a polynucleotide sequence capable of being bound and cleaved by a ribonuclear protein complex (RNP) comprising the Class 2 Type V protein and the first gRNA,
wherein the target nucleic acid sequence is modified by an RNP of the expressed Class 2 Type V protein and the first gRNA; and wherein the one or more self-inactivating segments of the polynucleotide are located:
1) 5′ or 3′ adjacent to or within the sequence encoding the Class 2 Type V protein;
2) 5′ or 3′ adjacent to or within a Kozak sequence located between the first promoter and the sequence encoding the Class 2 Type V protein;
3) 5′ or 3′ adjacent to or within to the first promoter sequence;
4) 5′ or 3′ adjacent to or within the second promoter sequence;
5) 3′ downstream of the transcriptional start site for the sequence encoding the Class 2 Type V protein;
6) within one or more inserted introns in the polynucleotide encoding the Class 2 Type V protein;
7) at the 3′ end of the polynucleotide encoding the Class 2 Type V protein, between a stop codon and poly(A) termination site for the Class2 Type V protein; or
8) any combination of (g)-(m), and
wherein the PAM sequence of the one or more self-inactivating segments:
i) is different by at least one nucleotide from the PAM sequence of the target nucleic acid of the cell to be modified; and
ii) promotes less efficient cleavage or rate of cleavage of the self-inactivating segment by the RNP compared to the target nucleic acid of the cell to be modified, and
wherein cleavage by the RNP of the self-inactivating segment of the polynucleotide in a cell transduced or transfected with the SIRV results in reduced or eliminated expression of the Class 2 Type V protein or the gRNA encoded by the polynucleotide.

114. The method of claim 113, wherein the modifying comprises introducing a single-stranded break or a double-stranded break in the target nucleic acid sequence of the cell, or wherein the modifying comprises introducing an insertion, deletion, or mutation in the target nucleic acid sequence of the cell, wherein the self-inactivating segment of the SIRV is cleaved by an RNP of the Class 2 Type V protein and the first gRNA subsequent to the modifying of the target nucleic acid sequence of the cell, wherein the cleavage of the self-inactivating segment results in reduced off-target modifying of a nucleic acid sequence in the cell compared to a cell transduced with an SIRV not comprising the self-inactivating segments, and wherein the cleavage of the self-inactivating segment results in reduced or eliminated expression of the Class 2 Type V protein in the cell.

115. The method of claim 114, wherein the self-inactivating segment is cleaved at least about 9 days after the modifying of the target nucleic acid sequence.

116. A composition comprising:
a) an AAV expression cassette; and
b) a polynucleotide comprising sequences encoding one or more small hairpin RNA (shRNA) sequences, each operably linked to a promoter, wherein the polynucleotide comprising the shRNA and linked promoters are linked exterior to the AAV transgene incorporated into a bacterial plasmid backbone,
wherein the AAV expression cassette comprises:
(i) a first adeno-associated virus (AAV) inverted terminal repeat (ITR) sequence;
(ii) a second AAV ITR sequence;
(iii) a sequence encoding a Class 2 Type V protein having a single RNA-guided RuvC domain;
(iv) a first promoter operably linked to the sequence encoding the Class 2 Type V protein;
(v) a sequence encoding a first guide RNA (gRNA) comprising a scaffold sequence and a linked targeting sequence that is complementary to and capable of hybridizing with a target nucleic acid of a cell to be modified; and
(vi) a second promoter sequence operably linked to the sequence encoding the first gRNA;
wherein the Class 2, Type V protein and gRNA encoding sequences are capable of being transcribed in a packaging cell transfected with the AAV expression cassette.

117. The composition of claim 116, wherein the shRNA encoding sequence comprises a sequence selected from the group consisting of SEQ ID NOS: 2640-2687, or a sequence having at least 85% identity thereto.

118. The composition of claim 116, wherein the polynucleotide comprising the shRNA and linked promoters are inserted into
a) an AAV RepCap plasmid;
b) an AAV Helper plasmid; and/or
c) a separate vector.

119. The composition of claim 116, wherein the encoded Class 2, Type V protein comprises a sequence selected from the group consisting of SEQ ID NOS: 1-3, 49-321 and 2356-2488, or a sequence having at least 85% identity thereto.

120. The composition of claim 116, wherein the first gRNA comprises a scaffold sequence selected from the group of sequences consisting of SEQ ID NOS: 2101-2331, 3992-3995, and 4028 or a sequence having at least 85% identity thereto.

121. The composition of claim 116, wherein the shRNA is capable of being expressed and processed in a packaging cell transfected with the polynucleotide into a siRNA sequence complementary to and capable of hybridizing with an mRNA of the Class 2, Type V protein transcribed by the packaging cell, wherein the packaging cell is selected from the group consisting of baby hamster kidney (BHK), human embryonic kidney 293 (HEK293), HEK293T, NS0, SP2/0, YO myeloma cells, A549, P3X63 mouse myeloma cells, PER, PER.C6, NIH3T3, COS, HeLa, and Chinese hamster ovary (CHO), and wherein upon hybridization of the siRNA sequence to the mRNA of the Class 2, Type V protein, the Class 2, Type V protein mRNA is degraded such that expression of the Class 2, Type V protein is reduced or eliminated in the packaging cell.

122. The composition of claim 121, wherein expression of the Class 2, Type V protein is reduced by at least 70% compared to a transfected packaging cell not comprising the shRNA, when assayed in a timed in vitro assay under comparable conditions.

123. The composition of claim 116, wherein the AAV expression cassette comprises:
a) one or more self-inactivating segments comprising a protospacer adjacent motif (PAM) sequence and a polynucleotide sequence capable of being bound and cleaved by a ribonuclear protein complex (RNP) of the Class 2 Type V protein and a second gRNA;
b) a sequence encoding a second gRNA comprising a targeting sequence complementary to the self-inactivating segment; and
c) a third promoter operably linked to the second gRNA, wherein the one or more self-inactivating segments of the polynucleotide are located:
1) 5′ or 3′ adjacent to or within the sequence encoding the Class 2 Type V protein;
2) 5′ or 3′ adjacent to or within a Kozak sequence located between the first promoter and the sequence encoding the Class 2 Type V protein;
3) 5′ or 3′ adjacent to or within to the first promoter sequence;
4) 5′ or 3′ adjacent to or within the second promoter sequence;
5) 5′ or 3′ adjacent to or within the third promoter sequence;
6) 3′ downstream of the transcriptional start site for the sequence encoding the Class 2 Type V protein;
7) within one or more inserted introns in the polynucleotide encoding the Class 2 Type V protein;
8) at the 3′ end of the polynucleotide encoding the Class 2 Type V protein, between a stop codon and poly(A) termination site of the sequence encoding the Class 2 Type V protein; or
9) any combination of (a)-(h), and
wherein cleavage of the self-inactivating segments in a cell transfected with the composition by the RNP of the Class 2 Type V protein and the second gRNA results in reduced or eliminated expression of the Class 2 Type V protein or the gRNA encoded by the polynucleotide.

124. The composition of claim 123, wherein the second gRNA comprises a scaffold sequence selected from the group of sequences consisting of SEQ ID NOS: 2101-2331, 3992-3995, and 4028 or a sequence having at least 85% identity thereto.

125. The composition of claim 123, wherein the self-inactivating segment comprises a 15-21 nucleotide sequence complementary to the targeting sequence of the second gRNA and that is 3′ adjacent to a PAM sequence recognized by an RNP of the Class 2 Type V protein and the second gRNA.

126. The composition of claim 123, wherein the PAM sequence of the one or more self-inactivating segments promotes less efficient cleavage or rate of cleavage of the self-inactivating segment by the RNP of the Class 2 Type V protein and the second gRNA compared to the PAM sequence 5′ and adjacent to the target nucleic acid of the cell to be modified.

127. A method for reducing premature cleavage of a self-inactivating AAV (siAAV) transgene encoding a Class 2 Type V nuclease protein and one or more gRNAs in a packaging cell, comprising introducing a polynucleotide sequence encoding one or more small hairpin RNA (shRNA) and linked promoters into the packaging cell comprising the siAAV transgene, wherein the polynucleotide comprising the shRNA and linked promoters are linked exterior to the AAV transgene inserted into a bacterial plasmid backbone, and wherein the shRNA is capable of being expressed and processed into an siRNA sequence, and
wherein the siRNA sequence is complementary to an mRNA of the Class 2 Type V nuclease transcribed by the packaging cell,
wherein the packaging cell is selected from the group consisting of BHK, HEK293, HEK293T, NS0, SP2/0, YO myeloma cells, A549, P3X63 mouse myeloma cells, PER, PER.C6, NIH3T3, COS, HeLa, and CHO, and
wherein the transgene comprises:
a) a first adeno-associated virus (AAV) inverted terminal repeat (ITR) sequence;
b) a second AAV ITR sequence;
c) a sequence encoding a Class 2 Type V protein having a single RNA-guided RuvC domain;
d) a first promoter operably linked to the sequence encoding the Class 2 Type V protein;
e) a sequence encoding a first guide RNA (gRNA) comprising a scaffold sequence and a linked targeting sequence that is complementary to and capable of hybridizing with a target nucleic acid of a cell to be modified; and
f) a second promoter sequence operably linked to the sequence encoding the first gRNA
g) a sequence encoding a second guide RNA (gRNA) comprising a scaffold sequence and a linked targeting sequence complementary to one or more self-inactivating segments of the transgene;
h) a third promoter sequence operably linked to the sequence encoding the second gRNA, wherein the third promoter has a sequence different from the sequence of the second promoter; and
i) one or more self-inactivating segments of the polynucleotide comprising a protospacer adjacent motif (PAM) sequence and a polynucleotide sequence capable of being bound and cleaved by a ribonuclear protein complex (RNP) of the Class 2 Type V protein and the second gRNA.

128. The method of claim 127, wherein the shRNA encoding sequence comprises a sequence selected from the group consisting of SEQ ID NOS: 2640-2687, or a sequence having at least 85% identity thereto.

129. The method of claim 128, wherein the polynucleotide comprising the shRNA and linked promoters are inserted into;
a) an AAV RepCap plasmid;
b) an AAV Helper plasmid; and/or
c) a separate vector.

130. The method of claim 127, wherein upon transcription of the shRNA and Class 2 Type V nuclease sequences, the shRNA is processed into siRNA which hybridizes with the mRNA of the Class 2 Type V nuclease and is degraded by the packaging cell.

131. The method of claim 130, wherein expression of the Class 2 Type V nuclease protein in the packaging cell is repressed by at least 70% compared to a transfected packaging cell not comprising the shRNA sequence, when assayed in a timed in vitro assay under comparable conditions.

132. The method of claim 127, wherein the Class 2 Type V nuclease protein is a CasX comprising a sequence of SEQ ID NO: 145, or a sequence having at least 85% identity thereto.

133. The method of claim 127, wherein the first and second gRNA each have a scaffold comprising a sequence of SEQ ID NO: 2296, or a sequence having at least about 70% sequence identity thereto.

134. The method of claim 127, wherein the second guide comprises a sequence of SEQ ID NO: 2238 and the first guide comprises a sequence of SEQ ID NO: 2296.

The application's sequence listing, which the Patent Office published only in electronic form, follows.

SEQUENCE LISTING (4157 sequences)

SEQ ID NO: 1 - protein, 986 aa, unidentified
  source 1..986: note = Deltaproteobacteria sp.
MEKRINKIRKKLSADNATKPVSRSGPMKTLLVRVMTDDLKKRLEKRRKKPEVMPQVISNNAANNLRMLLDDYTKMKEAILQVYWQEFKDDHVGLMCKFAQPASKKIDQNKLKPEMDEKGNLTTAGFACSQCGQPLFVYKLEQVSEKGKAYTNYFGRCNVAEHEKLILLAQLKPEKDSDEAVTYSLGKFGQRALDFYSIHVTKESTHPVKPLAQIAGNRYASGPVGKALSDACMGTIASFLSKYQDIIIEHQKVVKGNQKRLESLRELAGKENLEYPSVTLPPQPHTKEGVDAYNEVIARVRMWVNLNLWQKLKLSRDDAKPLLRLKGFPSFPVVERRENEVDWWNTINEVKKLIDAKRDMGRVFWSGVTAEKRNTILEGYNYLPNENDHKKREGSLENPKKPAKRQFGDLLLYLEKKYAGDWGKVFDEAWERIDKKIAGLTSHIEREEARNAEDAQSKAVLTDWLRAKASFVLERLKEMDEKEFYACEIQLQKWYGDLRGNPFAVEAENRVVDISGFSIGSDGHSIQYRNLLAWKYLENGKREFYLLMNYGKKGRIRFTDGTDIKKSGKWQGLLYGGGKAKVIDLTFDPDDEQLIILPLAFGTRQGREFIWNDLLSLETGLIKLANGRVIEKTIYNKKIGRDEPALFVALTFERREVVDPSNIKPVNLIGVDRGENIPAVIALTDPEGCPLPEFKDSSGGPTDILRIGEGYKEKQRAIQAAKEVEQRRAGGYSRKFASKSRNLADDMVRNSARDLFYHAVTHDAVLVFENLSRGFGRQGKRTFMTERQYTKMEDWLTAKLAYEGLTSKTYLSKTLAQYTSKTCSNCGFTITTADYDGMLVRLKKTSDGWATTLNNKELKAEGQITYYNRYKRQTVEKELSAELDRLSEESGNNDISKWTKGRRDEALFLLKKRFSHRPVQEQFVCLDCGHEVHADEQAALNIARSWLFLNSNSTEFKSYKSGKQPFVGAWQAFYKRRLKEVWKPNA

SEQ ID NO: 2 - protein, 978 aa, unidentified
  source 1..978: note = Planctomycetes sp.
MQEIKRINKIRRRLVKDSNTKKAGKTGPMKTLLVRVMTPDLRERLENLRKKPENIPQPISNTSRANLNKLLTDYTEMKKAILHVYWEEFQKDPVGLMSRVAQPAPKNIDQRKLIPVKDGNERLTSSGFACSQCCQPLYVYKLEQVNDKGKPHTNYFGRCNVSEHERLILLSPHKPEANDELVTYSLGKFGQRALDFYSIHVTRESNHPVKPLEQIGGNSCASGPVGKALSDACMGAVASFLTKYQDIILEHQKVIKKNEKRLANLKDIASANGLAFPKITLPPQPHTKEGIEAYNNVVAQIVIWVNLNLWQKLKIGRDEAKPLQRLKGFPSFPLVERQANEVDWWDMVCNVKKLINEKKEDGKVFWQNLAGYKRQEALLPYLSSEEDRKKGKKFARYQFGDLLLHLEKKHGEDWGKVYDEAWERIDKKVEGLSKHIKLEEERRSEDAQSKAALTDWLRAKASFVIEGLKEADKDEFCRCELKLQKWYGDLRGKPFAIEAENSILDISGFSKQYNCAFIWQKDGVKKLNLYLIINYFKGGKLRFKKIKPEAFEANRFYTVINKKSGEIVPMEVNFNFDDPNLIILPLAFGKRQGREFIWNDLLSLETGSLKLANGRVIEKTLYNRRTRQDEPALFVALTFERREVLDSSNIKPMNLIGIDRGENIPAVIALTDPEGCPLSRFKDSLGNPTHILRIGESYKEKQRTIQAAKEVEQRRAGGYSRKYASKAKNLADDMVRNTARDLLYYAVTQDAMLIFENLSRGFGRQGKRTFMAERQYTRMEDWLTAKLAYEGLPSKTYLSKTLAQYTSKTCSNCGFTITSADYDRVLEKLKKTATGWMTTINGKELKVEGQITYYNRYKRQNVVKDLSVELDRLSEESVNNDISSWTKGRSGEALSLLKKRFSHRPVQEKFVCLNCGFETHADEQAALNIARSWLFLRSQEYKKYQTNKTTGNTDKRAFVETWQSFYRKKLKEVWKPAV

SEQ ID NO: 3 - protein, 855 aa, unidentified
  source 1..855: note = Candidatus Sungbacteria sp.
MDNANKPSTKSLVNTTRISDHFGVTPGQVTRVFSFGIIPTKRQYAIIERWFAAVEAARERLYGMLYAHFQENPPAYLKEKFSYETFFKGRPVLNGLRDIDPTIMTSAVFTALRHKAEGAMAAFHTNHRRLFEEARKKMREYAECLKANEALLRGAADIDWDKIVNALRTRLNTCLAPEYDAVIADFGALCAFRALIAETNALKGAYNHALNQMLPALVKVDEPEEAEESPRLRFFNGRINDLPKFPVAERETPPDTETIIRQLEDMARVIPDTAEILGYIHRIRHKAARRKPGSAVPLPQRVALYCAIRMERNPEEDPSTVAGHFLGEIDRVCEKRRQGLVRTPFDSQIRARYMDIISFRATLAHPDRWTEIQFLRSNAASRRVRAETISAPFEGFSWTSNRTNPAPQYGMALAKDANAPADAPELCICLSPSSAAFSVREKGGDLIYMRPTGGRRGKDNPGKEITWVPGSFDEYPASGVALKLRLYFGRSQARRMLTNKTWGLLSDNPRVFAANAELVGKKRNPQDRWKLFFHMVISGPPPVEYLDFSSDVRSRARTVIGINRGEVNPLAYAVVSVEDGQVLEEGLLGKKEYIDQLIETRRRISEYQSREQTPPRDLRQRVRHLQDTVLGSARAKIHSLIAFWKGILAIERLDDQFHGREQKIIPKKTYLANKTGFMNALSFSGAVRVDKKGNPWGGMIEIYPGGISRTCTQCGTVWLARRPKNPGHRDAMVVIPDIVDDAAATGFDNVDCDAGTVDYGELFTLSREWVRLTPRYSRVMRGTLGDLERAIRQGDDRKSRQMLELALEPQPQWGQFFCHRCGFNGQSDVLAATNLARRAISLIRRLPDTDTPPTP

SEQ ID NO: 4 - RNA, 108 nt, synthetic construct
  source 1..108: mol_type = other RNA
acatctggcgcgtttattccattactttggagccagtcccagcgactatgtcgtatggacgaagcgcttatttatcggagagaaaccgataagtaaaacgcatcaaag

SEQ ID NO: 5 - RNA, 108 nt, synthetic construct
  source 1..108: mol_type = other RNA
tactggcgcttttatctcattactttgagagccatcaccagcgactatgtcgtatgggtaaagcgcttatttatcggagagaaatccgataaataagaagcatcaaag

SEQ ID NO: 6 - RNA, 81 nt, synthetic construct
  source 1..81: mol_type = other RNA
acatctggcgcgtttattccattactttggagccagtcccagcgactatgtcgtatggacgaagcgcttatttatcggaga

SEQ ID NO: 7 - RNA, 78 nt, synthetic construct
  source 1..78: mol_type = other RNA
acatctggcgcgtttattccattactttggagccagtcccagcgactatgtcgtatggacgaagcgcttatttatcgg

SEQ ID NO: 8 - RNA, 80 nt, synthetic construct
  source 1..80: mol_type = other RNA
tactggcgcttttatctcattactttgagagccatcaccagcgactatgtcgtatgggtaaagcgcttatttatcggaga

SEQ ID NO: 9 - RNA, 77 nt, synthetic construct
  source 1..77: mol_type = other RNA
tactggcgcttttatctcattactttgagagccatcaccagcgactatgtcgtatgggtaaagcgcttatttatcgg

SEQ ID NO: 10 - RNA, 25 nt, synthetic construct
  source 1..25: mol_type = other RNA
gtttacacactccctctcatagggt

SEQ ID NO: 11 - RNA, 25 nt, synthetic construct
  source 1..25: mol_type = other RNA
gtttacacactccctctcatgaggt

SEQ ID NO: 12 - RNA, 25 nt, synthetic construct
  source 1..25: mol_type = other RNA
ttttacataccccctctcatgggat

SEQ ID NO: 13 - RNA, 25 nt, synthetic construct
  source 1..25: mol_type = other RNA
gtttacacactccctctcatggggg

SEQ ID NO: 14 - RNA, 20 nt, synthetic construct
  source 1..20: mol_type = other RNA
ccagcgactatgtcgtatgg

SEQ ID NO: 15 - RNA, 39 nt, synthetic construct
  source 1..39: mol_type = other RNA
gcgcttatttatcggagagaaatccgataaataagaagc

SEQ ID NO: 16 - RNA, 74 nt, synthetic construct
  source 1..74: mol_type = other RNA
ggcgcttttatctcattactttgagagccatcaccagcgactatgtcgtatgggtaaagcgcttatttatcgga

SEQ ID NO: 17 - DNA, 32 bp, synthetic construct
  source 1..32: mol_type = other DNA
  variation 10..30: note = n is any nucleotide
taactantcnnnnnnnnnnnnnnnnnnnnngc

SEQ ID NO: 18 - skipped

SEQ ID NO: 19 - DNA, 32 bp, synthetic construct
  source 1..32: mol_type = other DNA
  variation 10..30: note = n is any nucleotide
taactattcnnnnnnnnnnnnnnnnnnnnngc

SEQ ID NO: 20 - skipped

SEQ ID NO: 21 - RNA, 19 nt, synthetic construct
  source 1..19: mol_type = other RNA
acatgaggatcacccatgt

SEQ ID NO: 22 - RNA, 20 nt, synthetic construct
  source 1..20: mol_type = other RNA
atgcatgtctaagacagcat

SEQ ID NO: 23 - RNA, 29 nt, synthetic construct
  source 1..29: mol_type = other RNA
ggaatccattgcactccggatttcactag

SEQ ID NO: 24 - RNA, 12 nt, synthetic construct
  source 1..12: mol_type = other RNA
cctcttcggagg

SEQ ID NO: 25 - RNA, 23 nt, synthetic construct
  source 1..23: mol_type = other RNA
aaggagtttatatggaaaccctt

SEQ ID NO: 26 - RNA, 30 nt, synthetic construct
  source 1..30: mol_type = other RNA
aggtgggacgacctctcggtcgtcctatct

SEQ ID NO: 27 - RNA, 19 nt, synthetic construct
  source 1..19: mol_type = other RNA
tgctcgctccgttcgagca

SEQ ID NO: 28 - RNA, 21 nt, synthetic construct
  source 1..21: mol_type = other RNA
tgctcgacgcgtcctcgagca

SEQ ID NO: 29 - RNA, 22 nt, synthetic construct
  source 1..22: mol_type = other RNA
tgctcgtttgcggctacgagca

SEQ ID NO: 30 - RNA, 17 nt, synthetic construct
  source 1..17: mol_type = other RNA
agggagggagggagagg

SEQ ID NO: 31 - RNA, 19 nt, synthetic construct
  source 1..19: mol_type = other RNA
ggttagggttagggttagg

SEQ ID NO: 32 - RNA, 25 nt, synthetic construct
  source 1..25: mol_type = other RNA
ctgctcagtacgagaggaaccgcag

SEQ ID NO: 33 - RNA, 78 nt, synthetic construct
  source 1..78: mol_type = other RNA
tacactgggatcgctgaattagagatcggcgtcctttcattctatatactttggagttttaaaatgtctctaagtaca

SEQ ID NO: 34 - RNA, 23 nt, unidentified
  source 1..23: mol_type = other RNA; note = Deltaproteobacteria sp.
ccgataagtaaaacgcatcaaag

SEQ ID NO: 35 - RNA, 26 nt, unidentified
  source 1..26: mol_type = other RNA; note = Planctomycetes sp.
tctccgataaataagaagcatcaaag

SEQ ID NO: 36 - RNA, 21 nt, synthetic construct
  source 1..21: mol_type = other RNA
ccagcgactatgtcgtagtgg

SEQ ID NO: 37 - protein, 84 aa, synthetic construct
MASMISSSAVTTVSRASRGQSAAMAPFGGLKSMTGFPVRKVNTDITSITSNGGRVKCMQVWPPIGKKKFETLSYLPPLTRDSRA

SEQ ID NO: 38 - protein, 57 aa, synthetic construct
MASMISSSAVTTVSRASRGQSAAMAPFGGLKSMTGFPVRKVNTDITSITSNGGRVKS

SEQ ID NO: 39 - protein, 85 aa, synthetic construct
MASSMLSSATMVASPAQATMVAPFNGLKSSAAFPATRKANNDITSITSNGGRVNCMQVWPPIEKKKFETLSYLPDLTDSGGRVNC

SEQ ID NO: 40 - protein, 76 aa, synthetic construct
MAQVSRICNGVQNPSLISNLSKSSQRKSPLSVSLKTQQHPRAYPISSSWGLKKSGMTLIGSELRPLKVMSSVSTAC

SEQ ID NO: 41 - protein, 76 aa, synthetic construct
MAQVSRICNGVWNPSLISNLSKSSQRKSPLSVSLKTQQHPRAYPISSSWGLKKSGMTLIGSELRPLKVMSSVSTAC

SEQ ID NO: 42 - protein, 72 aa, synthetic construct
MAQINNMAQGIQTLNPNSNFHKPQVPKSSSFLVFGSKKLKNSANSMLVLKKDSIFMQLFCSFRISASVATAC

SEQ ID NO: 43 - protein, 69 aa, synthetic construct
MAALVTSQLATSGTVLSVTDRFRRPGFQGLRPRNPADAALGMRTVGASAAPKQSRKPHRFDRRCLSMVV

SEQ ID NO: 44 - protein, 77 aa, synthetic construct
MAALTTSQLATSATGFGIADRSAPSSLLRHGFQGLKPRSPAGGDATSLSVTTSARATPKQQRSVQRGSRRFPSVVVC

SEQ ID NO: 45 - protein, 57 aa, synthetic construct
MASSVLSSAAVATRSNVAQANMVAPFTGLKSAASFPVSRKQNLDITSIASNGGRVQC

SEQ ID NO: 46 - protein, 65 aa, synthetic construct
MESLAATSVFAPSRVAVPAARALVRAGTVVPTRRTSSTSGTSGVKCSAAVTPQASPVISRSAAAA

SEQ ID NO: 47 - protein, 72 aa, synthetic construct
MGAAATSMQSLKFSNRLVPPSRRLSPVPNNVTCNNLPKSAAPVRTVKCCASSWNSTINGAAATTNGASAASS

SEQ ID NO: 48 - protein, 20 aa, synthetic construct
  VARIANT 4: note = X is K, H or R
  VARIANT 8: note = X is K, H or R
  VARIANT 11: note = X is K, H or R
  VARIANT 15: note = X is K, H or R
  VARIANT 19: note = X is K, H or R
GLFXALLXLLXSLWXLLLXA

SEQ ID NO: 49 - protein, 978 aa, synthetic construct
MQEIKRINKIRRRLVKDSNTKKAGKTGPMKTLLVRVMTPDLRERLENLRKKPENIPQPISNTSRANLNKLLTDYTEMKKAILHVYWEEFQKDPVGLMSRVAQPASKKIDQNKLKPEMDEKGNLTTAGFACSQCGQPLFVYKLEQVSEKGKAYTNYFGRCNVAEHEKLILLAQLKPEKDSDEAVTYSLGKFGQRALDFYSIHVTRESNHPVKPLEQIGGNSCASGPVGKALSDACMGAVASFLTKYQDIILEHQKVIKKNEKRLANLKDIASANGLAFPKITLPPQPHTKEGIEAYNNVVAQIVIWVNLNLWQKLKIGRDEAKPLQRLKGFPSFPLVERQANEVDWWDMVCNVKKLINEKKEDGKVFWQNLAGYKRQEALRPYLSSEEDRKKGKKFARYQFGDLLLHLEKKHGEDWGKVYDEAWERIDKKVEGLSKHIKLEEERRSEDAQSKAALTDWLRAKASFVIEGLKEADKDEFCRCELKLQKWYGDLRGKPFAIEAENSILDISGFSKQYNCAFIWQKDGVKKLNLYLIINYFKGGKLRFKKIKPEAFEANRFYTVINKKSGEIVPMEVNFNFDDPNLIILPLAFGKRQGREFIWNDLLSLETGSLKLANGRVIEKTLYNRRTRQDEPALFVALTFERREVLDSSNIKPMNLIGIDRGENIPAVIALTDPEGCPLSRFKDSLGNPTHILRIGESYKEKQRTIQAKKEVEQRRAGGYSRKYASKAKNLADDMVRNTARDLLYYAVTQDAMLIFENLSRGFGRQGKRTFMAERQYTRMEDWLTAKLAYEGLSKTYLSKTLAQYTSKTCSNCGFTITSADYDRVLEKLKKTATGWMTTINGKELKVEGQITYYNRYKRQNVVKDLSVELDRLSEESVNNDISSWTKGRSGEALSLLKKRFSHRPVQEKFVCLNCGFETHADEQAALNIARSWLFLRSQEYKKYQTNKTTGNTDKRAFVETWQSFYRKKLKEVWKPAV

SEQ ID NO: 50 - protein, 977 aa, synthetic construct
MQEIKRINKIRRRLVKDSNTKKAGKTGPMKTLLVRVMTPDLRERLENLRKKPENIPQPISNTSRANLNKLLTDYTEMKKAILHVYWEEFQKDPVGLMSRVAQPAPKNIDQRKLIPVKDGNERLTSSGFACSQCCQPLYVYKLEQVNDKGKPHTNYFGRCNVSEHERLILLSPHKPEANDELVTYSLGKFGQRALDFYSIHVTRESNHPVKPLEQIGGNSCASGPVGKALSDACMGAVASFLTKYQDIILEHQKVIKKNEKRLANLKDIASANGLAFPKITLPPQPHTKEGIEAYNNVVAQIVIWVNLNLWQKLKIGRDEAKPLQRLKGFPSFPLVERQANEVDWWDMVCNVKKLINEKKEDGKVFWQNLAGYKRQEALRPYLSSEEDRKKGKKFARYQFGDLLLHLEKKHGEDWGKVYDEAWERIDKKVEGLSKHIKLEEERRSEDAQSKAALTDWLRAKASFVIEGLKEADKDEFCRCELKLQKWYGDLRGKPFAIEAENSILDISGFSKQYNCAFIWQKDGVKKLNLYLIINYFKGGKLRFKKIKPEAFEANRFYTVINKKSGEIVPMEVNFNFDDPNLIILPLAFGKRQGREFIWNDLLSLETGSLKLANGRVIEKTLYNRRTRQDEPALFVALTFERREVLDSSNIKPMNLIGIDRGENIPAVIALTDPEGCPLSRFKDSLGNPTHILRIGESYKEKQRTIQAKKEVEQRRAGGYSRKYASKAKNLADDMVRNTARDLLYYAVTQDAMLIFENLSRGFGRQGKRTFMAERQYTRMEDWLTAKLAYEGLSKTYLSKTLAQYTSKTCSNCGFTITTADYDGMLVRLKKTSDGWATTLNNKELKAEGQITYYNRYKRQTVEKELSAELDRLSEESGNNDISKWTKGRRDEALFLLKKRFSHRPVQEQFVCLDCGHEVHADEQAALNIARSWLFLRSQEYKKYQTNKTTGNTDKRAFVETWQSFYRKKLKEVWKPAV

SEQ ID NO: 51 - protein, 985 aa, synthetic construct
MEKRINKIRKKLSADNATKPVSRSGPMKTLLVRVMTDDLKKRLEKRRKKPEVMPQVISNNAANNLRMLLDDYTKMKEAILQVYWQEFKDDHVGLMCKFAQPAPKNIDQRKLIPVKDGNERLTSSGFACSQCCQPLYVYKLEQVNDKGKPHTNYFGRCNVSEHERLILLSPHKPEANDELVTYSLGKFGQRALDFYSIHVTKESTHPVKPLAQIAGNRYASGPVGKALSDACMGTIASFLSKYQDIIIEHQKVVKGNQKRLESLRELAGKENLEYPSVTLPPQPHTKEGVDAYNEVIARVRMWVNLNLWQKLKLSRDDAKPLLRLKGFPSFPVVERRENEVDWWNTINEVKKLIDAKRDMGRVFWSGVTAEKRNTILEGYNYLPNENDHKKREGSLENPKKPAKRQFGDLLLYLEKKYAGDWGKVFDEAWERIDKKIAGLTSHIEREEARNAEDAQSKAVLTDWLRAKASFVLERLKEMDEKEFYACEIQLQKWYGDLRGNPFAVEAENRVVDISGFSIGSDGHSIQYRNLLAWKYLENGKREFYLLMNYGKKGRIRFTDGTDIKKSGKWQGLLYGGGKAKVIDLTFDPDDEQLIILPLAFGTRQGREFIWNDLLSLETGLIKLANGRVIEKTIYNKKIGRDEPALFVALTFERREVVDPSNIKPVNLIGVDRGENIPAVIALTDPEGCPLPEFKDSSGGPTDILRIGEGYKEKQRAIQAAKEVEQRRAGGYSRKFASKSRNLADDMVRNSARDLFYHAVTHDAVLVFENLSRGFGRQGKRTFMTERQYTKMEDWLTAKLAYEGLTSKTYLSKTLAQYTSKTCSNCGFTITTADYDGMLVRLKKTSDGWATTLNNKELKAEGQITYYNRYKRQTVEKELSAELDRLSEESGNNDISKWTKGRRDEALFLLKKRFSHRPVQEQFVCLDCGHEVHADEQAALNIARSWLFLNSNSTEFKSYKSGKQPFVGAWQAFYKRRLKEVWKPNA

SEQ ID NO: 52 - protein, 986 aa, synthetic construct
MEKRINKIRKKLSADNATKPVSRSGPMKTLLVRVMTDDLKKRLEKRRKKPEVMPQVISNNAANNLRMLLDDYTKMKEAILQVYWQEFKDDHVGLMCKFAQPASKKIDQNKLKPEMDEKGNLTTAGFACSQCGQPLFVYKLEQVSEKGKAYTNYFGRCNVAEHEKLILLAQLKPEKDSDEAVTYSLGKFGQRALDFYSIHVTKESTHPVKPLAQIAGNRYASGPVGKALSDACMGTIASFLSKYQDIIIEHQKVVKGNQKRLESLRELAGKENLEYPSVTLPPQPHTKEGVDAYNEVIARVRMWVNLNLWQKLKLSRDDAKPLLRLKGFPSFPVVERRENEVDWWNTINEVKKLIDAKRDMGRVFWSGVTAEKRNTILEGYNYLPNENDHKKREGSLENPKKPAKRQFGDLLLYLEKKYAGDWGKVFDEAWERIDKKIAGLTSHIEREEARNAEDAQSKAVLTDWLRAKASFVLERLKEMDEKEFYACEIQLQKWYGDLRGNPFAVEAENRVVDISGFSIGSDGHSIQYRNLLAWKYLENGKREFYLLMNYGKKGRIRFTDGTDIKKSGKWQGLLYGGGKAKVIDLTFDPDDEQLIILPLAFGTRQGREFIWNDLLSLETGLIKLANGRVIEKTIYNKKIGRDEPALFVALTFERREVVDPSNIKPVNLIGVDRGENIPAVIALTDPEGCPLPEFKDSSGGPTDILRIGEGYKEKQRAIQAAKEVEQRRAGGYSRKFASKSRNLADDMVRNSARDLFYHAVTHDAVLVFENLSRGFGRQGKRTFMTERQYTKMEDWLTAKLAYEGLTSKTYLSKTLAQYTSKTCSNCGFTITSADYDRVLEKLKKTATGWMTTINGKELKVEGQITYYNRYKRQNVVKDLSVELDRLSEESVNNDISSWTKGRSGEALSLLKKRFSHRPVQEKFVCLNCGFETHADEQAALNIARSWLFLNSNSTEFKSYKSGKQPFVGAWQAFYKRRLKEVWKPNA

SEQ ID NO: 53 - protein, 921 aa, synthetic construct
MQEIKRINKIRRRLVKDSNTKKAGKTGPMKTLLVRVMTPDLRERLENLRKKPENIPQPISNTSRANLNKLLTDYTEMKKAILHVYWEEFQKDPVGLMSRVAQPAPKNIDQRKLIPVKDGNERLTSSGFACSQCCQPLYVYKLEQVNDKGKPHTNYFGRCNVSEHERLILLSPHKPEANDELVTYSLGKFGQRALDFYSIHVTRESNHPVKPLEQIGGNSCASGPVGKALSDACMGAVASFLTKYQDIILEHQKVIKKNEKRLANLKDIASANGLAFPKITLPPQPHTKEGIEAYNNVVAQIVIWVNLNLWQKLKIGRDEAKPLQRLKGFPSFPLVERQANEVDWWDMVCNVKKLINEKKEDGKVFWQNLAGYKRQEALRPYLSSEEDRKKGKKFARYQFGDLLLHLEKKHGEDWGKVYDEAWERIDKKVEGLSKHIKLEEERRSEDAQSKAALTDWLRAKASFVIEGLKEADKDEFCRCELKLQKWYGDLRGKPFAIEAENSILDISGFSKQYNCAFIWQKDGVKKLNLYLIINYFKGGKLRFKKIKPEAFEANRFYTVINKKSGEIVPMEVNFNFDDPNLIILPLAFGKRQGREFIWNDLLSLETGSLKLANGRVIEKTLYNRRTRQDEPALFVALTFERREVLDSSNIKPVNLIGVDRGENIPAVIALTDPEGCPLPEFKDSSGGPTDILRIGEGYKEKQRAIQAAKEVEQRRAGGYSRKFASKSRNLADDMVRNSARDLFYHAVTHDAVLVFENLSRGFGRQGKRTFMTERQYTKMEDWLTAKLAYEGLTSKTYLSKTLAQYTSKTCSNCGFTITSADYDRVLEKLKKTATGWMTTINGKELKVEGQITYYNRYKRQNVVKDLSVELDRLSEESVNNDISSWTKGRSGEALSLLKKRFSHRPVQEKFVCLNCGFETHA

SEQ ID NO: 54 - protein, 920 aa, synthetic construct
MQEIKRINKIRRRLVKDSNTKKAGKTGPMKTLLVRVMTPDLRERLENLRKKPENIPQPISNTSRANLNKLLTDYTEMKKAILHVYWEEFQKDPVGLMSRVAQPAPKNIDQRKLIPVKDGNERLTSSGFACSQCCQPLYVYKLEQVNDKGKPHTNYFGRCNVSEHERLILLSPHKPEANDELVTYSLGKFGQRALDFYSIHVTRESNHPVKPLEQIGGNSCASGPVGKALSDACMGAVASFLTKYQDIILEHQKVIKKNEKRLANLKDIASANGLAFPKITLPPQPHTKEGIEAYNNVVAQIVIWVNLNLWQKLKIGRDEAKPLQRLKGFPSFPLVERQANEVDWWDMVCNVKKLINEKKEDGKVFWQNLAGYKRQEALRPYLSSEEDRKKGKKFARYQFGDLLLHLEKKHGEDWGKVYDEAWERIDKKVEGLSKHIKLEEERRSEDAQSKAALTDWLRAKASFVIEGLKEADKDEFCRCELKLQKWYGDLRGKPFAIEAENSILDISGFSKQYNCAFIWQKDGVKKLNLYLIINYFKGGKLRFKKIKPEAFEANRFYTVINKKSGEIVPMEVNFNFDDPNLIILPLAFGKRQGREFIWNDLLSLETGSLKLANGRVIEKTLYNRRTRQDEPALFVALTFERREVLDSSNIKPMNLIGIDRGENIPAVIALTDPEGCPLSRFKDSLGNPTHILRIGESYKEKQRTIQAKKEVEQRRAGGYSRKYASKAKNLADDMVRNTARDLLYYAVTQDAMLIFENLSRGFGRQGKRTFMAERQYTRMEDWLTAKLAYEGLSKTYLSKTLAQYTSKTCSNCGFTITSADYDRVLEKLKKTATGWMTTINGKELKVEGQITYYNRYKRQNVVKDLSVELDRLSEESVNNDISSWTKGRSGEALSLLKKRFSHRPVQEKFVCLNCGFETHA

SEQ ID NO: 55 - protein, 977 aa, synthetic construct
MQEIKRINKIRRRLVKDSNTKKAGKTGPMKTLLVRVMTPDLRERLENLRKKPENIPQPISNNAANNLRMLLDDYTKMKEAILQVYWQEFKDDHVGLMCKFAQPAPKNIDQRKLIPVKDGNERLTSSGFACSQCCQPLYVYKLEQVNDKGKPHTNYFGRCNVSEHERLILLSPHKPEANDELVTYSLGKFGQRALDFYSIHVTKESTHPVKPLAQIAGNRYASGPVGKALSDACMGTIASFLSKYQDIIIEHQKVVKGNQKRLESLRELAGKENLEYPSVTLPPQPHTKEGVDAYNEVIARVRMWVNLNLWQKLKLSRDDAKPLLRLKGFPSFPLVERQANEVDWWDMVCNVKKLINEKKEDGKVFWQNLAGYKRQEALRPYLSSEEDRKKGKKFARYQFGDLLLHLEKKHGEDWGKVYDEAWERIDKKVEGLSKHIKLEEERRSEDAQSKAALTDWLRAKASFVIEGLKEADKDEFCRCELKLQKWYGDLRGKPFAIEAENSILDISGFSKQYNCAFIWQKDGVKKLNLYLIINYFKGGKLRFKKIKPEAFEANRFYTVINKKSGEIVPMEVNFNFDDPNLIILPLAFGKRQGREFIWNDLLSLETGSLKLANGRVIEKTLYNRRTRQDEPALFVALTFERREVLDSSNIKPMNLIGIDRGENIPAVIALTDPEGCPLSRFKDSLGNPTHILRIGESYKEKQRTIQAKKEVEQRRAGGYSRKYASKAKNLADDMVRNTARDLLYYAVTQDAMLIFENLSRGFGRQGKRTFMAERQYTRMEDWLTAKLAYEGLSKTYLSKTLAQYTSKTCSNCGFTITSADYDRVLEKLKKTATGWMTTINGKELKVEGQITYYNRYKRQNVVKDLSVELDRLSEESVNNDISSWTKGRSGEALSLLKKRFSHRPVQEKFVCLNCGFETHADEQAALNIARSWLFLRSQEYKKYQTNKTTGNTDKRAFVETWQSFYRKKLKEVWKPAV

SEQ ID NO: 56 - protein, 986 aa, synthetic construct
MQEIKRINKIRRRLVKDSNTKKAGKTGPMKTLLVRVMTPDLRERLENLRKKPENIPQPISNTSRANLNKLLTDYTEMKKAILHVYWEEFQKDPVGLMSRVAQPAPKNIDQRKLIPVKDGNERLTSSGFACSQCCQPLYVYKLEQVNDKGKPHTNYFGRCNVSEHERLILLSPHKPEANDELVTYSLGKFGQRALDFYSIHVTRESNHPVKPLEQIGGNSCASGPVGKALSDACMGAVASFLTKYQDIILEHQKVIKKNEKRLANLKDIASANGLAFPKITLPPQPHTKEGIEAYNNVVAQIVIWVNLNLWQKLKIGRDEAKPLQRLKGFPSFPVVERRENEVDWWNTINEVKKLIDAKRDMGRVFWSGVTAEKRNTILEGYNYLPNENDHKKREGSLENPKKPAKRQFGDLLLYLEKKYAGDWGKVFDEAWERIDKKIAGLTSHIEREEARNAEDAQSKAVLTDWLRAKASFVLERLKEMDEKEFYACEIQLQKWYGDLRGNPFAVEAENSILDISGFSKQYNCAFIWQKDGVKKLNLYLIINYFKGGKLRFKKIKPEAFEANRFYTVINKKSGEIVPMEVNFNFDDPNLIILPLAFGKRQGREFIWNDLLSLETGSLKLANGRVIEKTLYNRRTRQDEPALFVALTFERREVLDSSNIKPMNLIGIDRGENIPAVIALTDPEGCPLSRFKDSLGNPTHILRIGESYKEKQRTIQAKKEVEQRRAGGYSRKYASKAKNLADDMVRNTARDLLYYAVTQDAMLIFENLSRGFGRQGKRTFMAERQYTRMEDWLTAKLAYEGLSKTYLSKTLAQYTSKTCSNCGFTITSADYDRVLEKLKKTATGWMTTINGKELKVEGQITYYNRYKRQNVVKDLSVELDRLSEESVNNDISSWTKGRSGEALSLLKKRFSHRPVQEKFVCLNCGFETHADEQAALNIARSWLFLRSQEYKKYQTNKTTGNTDKRAFVETWQSFYRKKLKEVWKPAV

SEQ ID NO: 57 - protein, 925 aa, synthetic construct
MISNTSRANLNKLLTDYTEMKKAILHVYWEEFQKDPVGLMSRVAQPAPKNIDQRKLIPVKDGNERLTSSGFACSQCCQPLYVYKLEQVNDKGKPHTNYFGRCNVSEHERLILLSPHKPEANDELVTYSLGKFGQRALDFYSIHVTRESNHPVKPLEQIGGNSCASGPVGKALSDACMGAVASFLTKYQDIILEHQKVIKKNEKRLANLKDIASANGLAFPKITLPPQPHTKEGIEAYNNVVAQIVIWVNLNLWQKLKIGRDEAKPLQRLKGFPSFPLVERQANEVDWWDMVCNVKKLINEKKEDGKVFWQNLAGYKRQEALRPYLSSEEDRKKGKKFARYQFGDLLLHLEKKHGEDWGKVYDEAWERIDKKVEGLSKHIKLEEERRSEDAQSKAALTDWLRAKASFVIEGLKEADKDEFCRCELKLQKWYGDLRGKPFAIEAENRVVDISGFSIGSDGHSIQYRNLLAWKYLENGKREFYLLMNYGKKGRIRFTDGTDIKKSGKWQGLLYGGGKAKVIDLTFDPDDEQLIILPLAFGTRQGREFIWNDLLSLETGLIKLANGRVIEKTIYNKKIGRDEPALFVALTFERREVVDPSNIKPMNLIGIDRGENIPAVIALTDPEGCPLSRFKDSLGNPTHILRIGESYKEKQRTIQAKKEVEQRRAGGYSRKYASKAKNLADDMVRNTARDLLYYAVTQDAMLIFENLSRGFGRQGKRTFMAERQYTRMEDWLTAKLAYEGLSKTYLSKTLAQYTSKTCSNCGFTITSADYDRVLEKLKKTATGWMTTINGKELKVEGQITYYNRYKRQNVVKDLSVELDRLSEESVNNDISSWTKGRSGEALSLLKKRFSHRPVQEKFVCLNCGFETHADEQAALNIARSWLFLRSQEYKKYQTNKTTGNTDKRAFVETWQSFYRKKLKEVWKPAV

SEQ ID NO: 58 - protein, 975 aa, synthetic construct
MEKRINKIRKKLSADNATKPVSRSGPMKTLLVRVMTDDLKKRLEKRRKKPEVMPQVISNTSRANLNKLLTDYTEMKKAILHVYWEEFQKDPVGLMSRVAQPAPKNIDQRKLIPVKDGNERLTSSGFACSQCCQPLYVYKLEQVNDKGKPHTNYFGRCNVSEHERLILLSPHKPEANDELVTYSLGKFGQRALDFYSIHVTRESNHPVKPLEQIGGNSCASGPVGKALSDACMGAVASFLTKYQDIILEHQKVIKKNEKRLANLKDIASANGLAFPKITLPPQPHTKEGIEAYNNVVAQIVIWVNLNLWQKLKIGRDEAKPLQRLKGFPSFPLVERQANEVDWWDMVCNVKKLINEKKEDGKVFWQNLAGYKRQEALRPYLSSEEDRKKGKKFARYQFGDLLLHLEKKHGEDWGKVYDEAWERIDKKVEGLSKHIKLEEERRSEDAQSKAALTDWLRAKASFVIEGLKEADKDEFCRCELKLQKWYGDLRGKPFAIEAENSILDISGFSKQYNCAFIWQKDGVKKLNLYLIINYFKGGKLRFKKIKPEAFEANRFYTVINKKSGEIVPMEVNFNFDDPNLIILPLAFGKRQGREFIWNDLLSLETGSLKLANGRVIEKTLYNRRTRQDEPALFVALTFERREVLDSSNIKPMNLIGIDRGENIPAVIALTDPEGCPLSRFKDSLGNPTHILRIGESYKEKQRTIQAKKEVEQRRAGGYSRKYASKAKNLADDMVRNTARDLLYYAVTQDAMLIFENLSRGFGRQGKRTFMAERQYTRMEDWLTAKLAYEGLSKTYLSKTLAQYTSKTCSNCGFTITSADYDRVLEKLKKTATGWMTTINGKELKVEGQITYYNRYKRQNVVKDLSVELDRLSEESVNNDISSWTKGRSGEALSLLKKRFSHRPVQEKFVCLNCGFETHADEQAALNIARSWLFLRSQEYKKYQTNKTTGNTDKRAFVETWQSFYRKKLKEVWKPAV

SEQ ID NO: 59 - protein, 982 aa, synthetic construct
MQEIKRINKIRRRLVKDSNTKKAGKTGPMKTLLVRVMTPDLRERLENLRKKPENIPQPISNTSRANLNKLLTDYTEMKKAILHVYWEEFQKDPVGLMSRVAQPAPKNIDQRKLIPVKDGNERLTSSGFACSQCCQPLYVYKLEQVNDKGKPHTNYFGRCNVSEHERLILLSPHKPEANDELVTYSLGKFGQRALDFYSIHVTRESNHPVKPLEQIGGNSCASGPVGKALSDACMGAVASFLTKYQDIILEHQKVIKKNEKRLANLKDIASANGLAFPKITLPPQPHTKEGIEAYNNVVAQIVIWVNLNLWQKLKIGRDEAKPLQRLKGFPSFPLVERQANEVDWWDMVCNVKKLINEKKEDGKVFWQNLAGYKRQEALRPYLSSEEDRKKGKKFARYQFGDLLLHLEKKHGEDWGKVYDEAWERIDKKVEGLSKHIKLEEERRSEDAQSKAALTDWLRAKASFVIEGLKEADKDEFCRCELKLQKWYGDLRGKPFAIEAENRVVDISGFSIGSDGHSIQYRNLLAWKYLENGKREFYLLMNYGKKGRIRFTDGTDIKKSGKWQGLLYGGGKAKVIDLTFDPDDEQLIILPLAFGTRQGREFIWNDLLSLETGLIKLANGRVIEKTIYNKKIGRDEPALFVALTFERREVVDPSNIKPMNLIGIDRGENIPAVIALTDPEGCPLSRFKDSLGNPTHILRIGESYKEKQRTIQAKKEVEQRRAGGYSRKYASKAKNLADDMVRNTARDLLYYAVTQDAMLIFENLSRGFGRQGKRTFMAERQYTRMEDWLTAKLAYEGLSKTYLSKTLAQYTSKTCSNCGFTITSADYDRVLEKLKKTATGWMTTINGKELKVEGQITYYNRYKRQNVVKDLSVELDRLSEESVNNDISSWTKGRSGEALSLLKKRFSHRPVQEKFVCLNCGFETHADEQAALNIARSWLFLRSQEYKKYQTNKTTGNTDKRAFVETWQSFYRKKLKEVWKPAV

SEQ ID NO: 60 - protein, 977 aa, synthetic construct
MQEIKRINKIRRRLVKDSNTKKAGKTGPMKTLLVRVMTPDLRERLENLRKKPENIPQPISNTSRANLNKLLTDYTEMKKAILHVYWEEFQKDPVGLMSRVAQPAPKNIDQRKLIPVKDGNERLTSSGFACSQCCQPLYVYKLEQVNDKGKPHTNYFGRCNVSEHERLILLSPHKPEANDELVTYSLGKFGQRALDFYSIHVTRESNHPVKPLEQIGGNSCASGPVGKALSDACMGAVASFLTKYQDIILEHQKVIKKNEKRLANLKDIASANGLAFPKITLPPQPHTKEGIEAYNNVVAQIVIWVNLNLWQKLKIGRDEAKPLQRLKGFPSFPLVERQANEVDWWDMVCNVKKLINEKKEDGKVFWQNLAGYKRQEALRPYLSSEEDRKKGKKFARYQFGDLLLHLEKKHGEDWGKVYDEAWERIDKKVEGLSKHIKLEEERRSEDAQSKAALTDWLRAKASFVIEGLKEADKDEFKRCELKLQKWYGDLRGKPFAIEAENSILDISGFSKQYNCAFIWQKDGVKKLNLYLIINYFKGGKLRFKKIKPEAFEANRFYTVINKKSGEIVPMEVNFNFDDPNLIILPLAFGKRQGREFIWNDLLSLETGSLKLANGRVIEKPLYNRRTRQDEPALFVALTFERREVLDSSNIKPMNLIGIDRGENIPAVIALTDPEGCPLSRFKDSLGNPTHILRIGESYKEKQRTIQAKKEVEQRRAGGYSRKYASKAKNLADDMVRNTARDLLYYAVTQDAMLIFENLSRGFGRQGKRTFMAERQYTRMEDWLTAKLAYEGLSKTYLSKTLAQYTSKTCSNCGFTITSADYDRVLEKLKKTATGWMTTINGKELKVEGQITYYNRYKRQNVVKDLSVELDRLSEESVNNDISSWTKGRSGEALSLLKKRFSHRPVQEKFVCLNCGFETHADEQAALNIARSWLFLRSQEYKKYQTNKTTGNTDKRAFVETWQSFYRKKLKEVWKPAV

SEQ ID NO: 61 - protein, 977 aa, synthetic construct
MQEIKRINKIRRRLVKDSNTKKAGKTGPMKTLLVRVMTPDLRERLENLRKKPENIPQPISNTSRANLNKLLTDYTEMKKAILHVYWEEFQKDPVGLMSRVAQPAPKNIDQRKLIPVKDGNERLTSSGFACSQCCQPLYVYKLEQVNDKGKPHTNYFGRCNVSEHERLILLSPHKPEANDELVTYSLGKFGQRALDFYSIHVTRESNHPVKPLEQIGGNSCASGPVGKALSDACMGAVASFLTKYQDIILEHQKVIKKNEKRLANLKDIASANGLAFPKITLPPQPHTKEGIEAYNNVVAQIVIWVNLNLWQKLKIGRDEAKPLQRLKGFPSFPLVERQANEVDWWDMVCNVKKLINEKKEDGKVFWQNLAGYKRQEALLPYLSSEEDRKKGKKFARYQFGDLLLHLEKKHGEDWGKVYDEAWERIDKKVEGLSKHIKLEEERRSEDAQSKAALTDWLRAKASFVIEGLKEADKDEFCRCELKLQKWYGDLRGKPFAIEAENSILDISGFSKQYNCAFIWQKDGVKKLNLYLIINYFKGGKLRFKKIKPEAFEANRFYTVINKKSGEIVPMEVNFNFDDPNLIILPLAFGKRQGREFIWNDLLSLETGSLKLANGRVIEKTLYNRRTRQDEPALFVALTFERREVLDSSNIKPMNLIGIDRGENIPAVIALTDPEGCPLSRFKDSLGNPTHILRIGESYKEKQRTIQAAKEVEQRRAGGYSRKYASKAKNLADDMVRNTARDLLYYAVTQDAMLIFENLSRGFGRQGKRTFAAERQYTRMEDWLTAKLAYEGLPSKTYLSKTLAQYTSKTCSNCGFTITSADYDRVLEKLKKTATGWMTTINGKELKVEGQITYYNRYKRQNVVKDLSVELDRLSEESVNNDISSWTKGRSGEALSLLKKRFSHRPVQEKFVCLNCGFETHADEQAALNIARSWLFLRSQEYKKYQTNKTTGNTDKRAFVETWQSFYRKKLKEVWKPA

SEQ ID NO: 62 - protein, 977 aa, synthetic construct
MQEIKRINKIRRRLVKDSNTKKAGKTGPMKTLLVRVMTPDLRERLENLRKKPENIPQPISNTSRANLNKLLTDYTEMKKAILHVYWEEFQKDPVGLMSRVAQPAPKNIDQRKLIPVKDGNERLTSSGFACSQCCQPLYVYKLEQVNDKGKPHTNYFGRCNVSEHERLILLSPHKPEANDELVTYSLGKFGQRALDFYSIHVTRESNHPVKPLEQIGGNSCASGPVGKALSDACMGAVASFLTKYQDIILEHQKVIKKNEKRLANLKDIASANGLAFPKITLPPQPHTKEGIEAYNNVVAQIVIWVNLNLWQKLKIGRDEAKPLQRLKGFPSFPLVERQANEVDWWDMVCNVKKLINEKKEDGKVFWQNLAGYKRQEALRPYLSSEEDRKKGKKFARYQFGDLLLHLEKKHGEDWGKVYDEAWERIDKKVEGLSKHIKLEEERRSEDAQSKAALTDWLRAKASFVIEGLKEADKDEFCRCELKLQKWYGDLRGKPFAIEAENSILDISGFSKQYNCAFIWQKDGVKKLNLYLIINYFKGGKLRFKKIKPEAFEANRFYTVINKKSGEIVPMEVNFNFDDPNLIILPLAFGKRQGREFIWNDLLSLETGSLKLANGRVIEKTLYNRRTRQDEPALFVALTFERREVLDSSNIKPMNLIGIDRGENIPAVIALTDPEGCPLSRFKDSLGNPTHILRIGESYKEKQRTIQAKKEVEQRRAGGYSRKYASKAKNLANDMVRNTARDLLYYAVTQDAMLIFENLSRGFGRQGKRTFMAERQYTRMEDWLTAKLAYEGLSKTYLSKTLAQYTSKTCSNCGFTITSADYDRVLEKLKKTATGWMTTINGKELKVEGQITYYNRYKRQNVVKDLSVELDRLSEESVNNDISSWTKGRSGEALSLLKKRFSHRPVQEKFVCLNCGFETHADEQAALNIARSWLFLRSQEYKKYQTNKTTGNTDKRAFVETWQSFYRKKLKEVWKPAV

SEQ ID NO: 63 - protein, 978 aa, synthetic construct
MQEIKRINKIRRRLVKDSNTKKAGKTGPMKTLLVRVMTPDLRERLENLRKKPENIPQPISNTSRANLNKLLTDYTEMKKAILHVYWEEFQKDPVGLMSRVAQPAPKNIDQRKLIPVKDGNERLTSSGFACSQCCQPLYVYKLEQVNDKGKPHTNYFGRCNVSEHERLILLSPHKPEANDELVTYSLGKFGQRALDFYSIHVTRESNHPVKPLEQIGGNSCASGPVGKALSDACMGAVASFLTKYQDIILEHQKVIKKNEKRLANLKDIASANGLAFPKITLPPQPHTKEGIEAYNNVVAQIVIWVNLNLWQKLKIGRDEAKPLQRLKGFPSFPLVERQANEVDWWDMVCNVKKLINEKKEDGKVFWQNLAGYKRQEALLPYLSSEEDRKKGKKFARYQFGDLLLHLEKKHGEDWGKVYDEAWERIDKKVEGLSKHIKLEEERRSEDAQSKAALTDWLRAKASFVIEGLKEADKDEFCRCELKLQKWYGDLRGKPFAIEAENSILDISGFSKQYNCAFIWQKDGVKKLNLYLIINYFKGGKLRFKKIKPEAFEANRFYTVINKKSGEIVPMEVNFNFDDPNLIILPLAFGKRQGREFIWNDLLSLETGSLKLANGRVIEKTLYNRRTRQDEPALFVALTFERREVLDSSNIKPMNLIGIDRGENIPAVIALTDPEGCPLSRFKDSLGNPTHILRIGESYKEKQRTIQAAKEVEQRRAGGYSRKYASKAKNLADDMVRNTARDLLYYAVTQDAMLIFENLSRGFGRQGKRTFMAERQYTRMEDQLTAKLAYEGLPSKTYLSKTLAQYTSKTCSNCGFTITSADYDRVLEKLKKTATGWMTTINGKELKVEGQITYYNRYKRQNVVKDLSVELDRLSEESVNNDISSWTKGRSGEALSLLKKRFSHRPVQEKFVCLNCGFETHADEQAALNIARSWLFLRSQEYKKYQTNKTTGNTDKRAFVETWQSFYRKKLKEVWKPAV

SEQ ID NO: 64 - protein, 978 aa, synthetic construct
MQEIKRINKIRRRLVKDSNTKKAGKTGPMKTLLVRVMTPDLRERLENLRKKPENIPQPISNTSRANLNKLLTDYTEMKKAILHVYWEEFQKDPVGLMSRVAQPAPKNIDQRKLIPVKDGNERLTSSGFACSQCCQPLYVYKLEQVNDKGKPHTNYFGRCNVSEHERLILLSPHKPEANDELVTYSLGKFGQRALDFYSIHVTRESNHPVKPLEQIGGNSCASGPVGKALSDACMGAVASFLTKYQDIILEHQKVIKKNEKRLANLKDIASANGLAFPKITLPPQPHTKEGIEAYNNVVAQIVIWVNLNLWQKLKIGRDEAKPLQRLKGFPSFPLVERQANEVDWWDMVCNVKKLINEKKEDGKVFWQNLAGYKRQEALLPYLSSEEDRKKGKKFARYQFGDLLLHLEKKHGEDWGKVYDEAWERIDKKVEGLSKHIKLEEERRSEDAQSKAALTDWLRAKASFVIEGLKEADKDEFCRCELKLQKWYGDLRGKPFAIEAENSILDISGFSKQYNCAFIWQKDGVKKLNLYLIINYFKGGKLRFKKIKPEAFEANRFYTVINKKSGEIVPMEVNFNFDDPNLIILPLAFGKRQGREFIWNDLLSLETGSLKLANGRVIEKTLYNRRTRQDEPALFVALTFERREVLDSSNIKPMNLIGIDRGENIPAVIALTDPEGCPLSRFKDSLGNPTHILRIGESYKEKQRTIQAAKEVEQRRAGGYSRKYASKAKNLADDMVRNTARDLLYYAVTQDAMLIFENLSRGFGRQGKRTFQAERQYTRMEDWLTAKLAYEGLPSKTYLSKTLAQYTSKTCSNCGFTITSADYDRVLEKLKKTATGWMTTINGKELKVEGQITYYNRYKRQNVVKDLSVELDRLSEESVNNDISSWTKGRSGEALSLLKKRFSHRPVQEKFVCLNCGFETHADEQAALNIARSWLFLRSQEYKKYQTNKTTGNTDKRAFVETWQSFYRKKLKEVWKPAV

SEQ ID NO: 65 - protein, 978 aa, synthetic construct
MQEIKRINKIRRRLVKDSNTKKAGKTGPMKTLLVRVMTPDLRERLENLRKKPENIPQPISNTSRANLNKLLTDYTEMKKAILHVYWEEFQKDPVGLMSRVAQPAPKNIDQRKLIPVKDGNERLTSSGFACSQCCQPLYVYKLEQVNDKGKPHTNYFGRCNVSEHERLILLSPHKPEANDELVTYSLGKFGQRALDFYSIHVTRESNHPVKPLEQIGGNSCASGPVGKALSDACMGAVASFLTKYQDIILEHQKVIKKNEKRLANLKDIASANGLAFPKITLPPQPHTKEGIEAYNNVVAQIVIWVNLNLWQKLKIGRDEAKPLQRLKGFPSFPLVERQANEVDWWDMVCNVKKLINEKKEDGKVFWQNLAGYKRQEALLPYLSSEEDRKKGKKFARYQFGDLLLHLEKKHGEDWGKVYDEAWERIDKKVEGLSKHIKLEEERRSEDAQSKAALTDWLIAKASFVIEGLKEADKDEFCRCELKLQKWYGDLRGKPFAIEAENSILDISGFSKQYNCAFIWQKDGVKKLNLYLIINYFKGGKLRFKKIKPEAFEANRFYTVINKKSGEIVPMEVNFNFDDPNLIILPLAFGKRQGREFIWNDLLSLETGSLKLANGRVIEKTLYNRRTRQDEPALFVALTFERREVLDSSNIKPMNLIGIDRGENIPAVIALTDPEGCPLSRFKDSLGNPTHILRIGESYKEKQRTIQAAKEVEQRRAGGYSRKYASKAKNLADDMVRNTVRDLLYYAVTQDAMLIFENLSRGFGRQGKRTFMAERQYTRMEDWLTAKLAYEGLPSKTYLSKTLAQYTSKTCSNCGFTITSADYDRVLEKLKKTATGWMTTINGKELKVEGQITYYNRYKRQNVVKDLSVELDRLSEESVNNDISSWTKGRSGEALSLLKKRFSHRPVQEKFVCLNCGFETHADEQAALNIARSWLFLRSQEYKKYQTNKTTGNTDKRAFVETWQSFYRKKLKEVWKPAV

SEQ ID NO: 66 - protein, 977 aa, synthetic construct
MQEIKRINKIRRRLVKDSNTKKAGKTGPMKTLLVRVMTPDLRERLENLRKKPENIPQPISNTSRANLNKLLTDYTEMKKAILHVYWEEFQKDPVGLMSRVAQPAPKNIDQRKLIPVKDGNERLTSSGFACSQCCQPLYVYKLEQVNDKGKPHTNYFGRCNVSEHERLILLSPHKPEANDELVTYSLGKFGQRALDFYSIHVTRESNHPVKPLEQIGGNSCASGPVGKALSDACMGAVASFLTKYQDIILEHQKVIKKNEKRLANLKDIASANGLAFPKITLPPQPHTKEGIEAYNNVVAQIVIWVNLNLWQKLKIGRDEAKPLQRLKGFPSFPLVERQANEVDWWDMVCNVKKLINEKKEDGKVFWQNLAGYKRQEALRPYLSSEEDRKKGKKFARYQFGDLLLHLEKKHGEDWGKVYDEAWERIDKKVEGLSKHIKLEEERRSEDAQSKAALTDWLRAKASFVIEGLKEADKDEFCRCELKLQKWYGDLRGKPFAIEAENSILDISGFSKQYNCAFIWQKDGVKKLNLYLIINYFKGGKLRFKKIKPEAFEANRFYTVINKKSGEIVPMEVNFNFDDPNLIILPLAFGKRQGREFIWNDLLSLETGSLKLANGRVIEKTLYNRRTRQDEPALFVALTFERREVLDSSNIKPMNLIGIDRGENIPAVIALTDPEGCPLSRFKDSLGNPTHILRIGESYKEKQRTIQAKKEVEQRRAGGYSRKYASKAKNLADDMVRNTARDLLYYAVTQDAMLIFENLSRGFGRQGKRTFNAERQYTRMEDWLTAKLAYEGLSKTYLSKTLAQYTSKTCSNCGFTITSADYDRVLEKLKKTATGWMTTINGKELKVEGQITYYNRYKRQNVVKDLSVELDRLSEESVNNDISSWTKGRSGEALSLLKKRFSHRPVQEKFVCLNCGFETHADEQAALNIARSWLFLRSQEYKKYQTNKTTGNTDKRAFVETWQSFYRKKLKEVWKPAV

SEQ ID NO: 67 - protein, 977 aa, synthetic construct
MQEIKRINKIRRRLVKDSNTKKAGKTGPMKTLLVRVMTPDLRERLENLRKKPENIPQPISNTSRANLNKLLTDYTEMKKAILHVYWEEFQKDPVGLMSRVAQPAPKNIDQRKLIPVKDGNERLTSSGFACSQCCQPLYVYKLEQVNDKGKPHTNYFGRCNVSEHERLILLSPHKPEANDELVTYSLGKFGQRALDFYSIHVTRESNHPVKPLEQIGGNSCASGPVGKALSDACMGAVASFLTKYQDIILEHQKVIKKNEKRLANLKDIASANGLAFPKITLPPQPHTKEGIEAYNNVVAQIVIWVNLNLWQKLKIGRDEAKPLQRLKGFPSFPLVERQANEVDWWDMVCNVKKLINEKKEDGKVFWQNLAGYKRQEALRPYLSSEEDRKKGKKFARYQFGDLLLHLEKKHGEDWGKVYDEAWERIDKKVEGLSKHIKLEEERRSEDAQSKAALTDWLRAKASFVIEGLKEADKDEFCRCELKLQKWYGDLRGKPFAIEAENSILDISGFSKQYNCAFIWQKDGVKKLNLYLIINYFKGGKLRFKKIKPEAFEANRFYTVINKKSGEIVPMEVNFNFDDPNLIILPLAFGKRQGREFIWNDLLSLETGSLKLANGRVIEKTLYNRRTRQDEPALFVALTFERREVLDSSNIKPMNLIGIDRGENIPAVIALTDPEGCPLSRFKDSLGNPTHILRIGESYKEKQRTIQAKKEVEQRRAGGYSRKYASKAKNLADDMVRNTTRDLLYYAVTQDAMLIFENLSRGFGRQGKRTFMAERQYTRMEDWLTAKLAYEGLSKTYLSKTLAQYTSKTCSNCGFTITSADYDRVLEKLKKTATGWMTTINGKELKVEGQITYYNRYKRQNVVKDLSVELDRLSEESVNNDISSWTKGRSGEALSLLKKRFSHRPVQEKFVCLNCGFETHADEQAALNIARSWLFLRSQEYKKYQTNKTTGNTDKRAFVETWQSFYRKKLKEVWKPAV

SEQ ID NO: 68 - protein, 977 aa, synthetic construct
MQEIKRINKIRRRLVKDSNTKKAGKTGPMKTLLVRVMTPDLRERLENLRKKPENIPQPISNTSRANLNKLLTDYTEMKKAILHVYWEEFQKDPVGLMSRVAQPAPKNIDQRKLIPVKDGNERLTSSGFACSQCCQPLYVYKLEQVNDKGKPHTNYFGRCNVSEHERLILLSPHKPEANDELVTYSLGKFGQRALDFYSIHVTRESNHPVKPLEQIGGNSCASGPVGKALSDACMGAVASFLTKYQDIILEHQKVIKKNEKRLANLKDIASANGLAFPKITLPPQPHTKEGIEAYNNVVAQIVIWVNLNLWQKLKIGRDEAKPLQRLKGFPSFPLVERQANEVDWWDMVCNVKKLINEKKEDGKVFWQNLAGYKRQEALRPYLSSEEDRKKGKKFARYQFGDLLLHLEKKHGEDWGKVYDEAWERIDKKVEGLSKHIKLEEERRSEDAQSKAALTDWLRAKASFVIEGLKEADKDEFKRCELKLQKWYGSLRGKPFAIEAENSILDISGFSKQYNCAFIWQKDGVKKLNLYLIINYFKGGKLRFKKIKPEAFEANRFYTVINKKSGEIVPMEVNFNFDDPNLIILPLAFGKRQGREFIWNDLLSLETGSLKLANGRVIEKTLYNRRTRQDEPALFVALTFERREVLDSSNIKPMNLIGIDRGENIPAVIALTDPEGCPLSRFKDSLGNPTHILRIGESYKEKQRTIQAKKEVEQRRAGGYSRKYASKAKNLADDMVRNTARDLLYYAVTQDAMLIFENLSRGFGRQGKRTFMAERQYTRMEDWLTAKLAYEGLSKTYLSKTLAQYTSKTCSNCGFTITSADYDRVLEKLKKTATGWMTTINGKELKVEGQITYYNRYKRQNVVKDLSVELDRLSEESVNNDISSWTKGRSGEALSLLKKRFSHRPVQEKFVCLNCGFETHADEQAALNIARSWLFLRSQEYKKYQTNKTTGNTDKRAFVETWQSFYRKKLKEVWKPAV

SEQ ID NO: 69 - protein, 977 aa, synthetic construct
MQEIKRINKIRRRLVKDSNTKKAGKTGPMKTLLVRVMTPDLRERLENLRKKPENIPQPISNTSRANLNKLLTDYTEMKKAILHVYWEEFQKDPVGLMSRVAQPAPKNIDQRKLIPVKDGNERLTSSGFACSQCCQPLYVYKLEQVNDKGKPHTNYFGRCNVSEHERLILLSPHKPEANDELVTYSLGKFGQRALDFYSIHVTRESNHPVKPLEQIGGNSCASGPVGKALSDACMGAVASFLTKYQDIILEHQKVIKKNEKRLANLKDIASANGLAFPKITLPPQPHTKEGIEAYNNVVAQIVIWVNLNLWQKLKIGRDEAKPLQRLKGFPSFPLVERQANEVDWWDMVCNVKKLINEKKEDGKVFWQNLAGYKRQEALRPYLSSEEDRKKGKKFARYQFGDLLLHLEKKHGEDWGKVYDEAWERIDKKVEGLSKHIKLEEERRSEDAQSKAALTDWLRAKASFVIEGLKEADKDEFKRCELKLQKWYGDLRGKPFAIEAENSILDISGFSKQYNCAFIWQKDGVKKLNLYLIINYFKGGKLRFKKIKPEAFEANRFYTVINKKSGEIVPMEVNFNFDDPNLIILPLAFGKRQGREFIWNDLLSLETGSLKLANGRVIEKTLYNRRTRQDEPALFVALTFERREVLDSSNIKPMNLIGIDRGENIPAVIALTDPEGCPLSRFKDSLGNPTHILRIGESYKEKQRTIQAKKEVEQRRAGGYSRKYASKAKNLANDMVRNTARDLLYYAVTQDAMLIFENLSRGFGRQGKRTFMAERQYTRMEDWLTAKLAYEGLSKTYLSKTLAQYTSKTCSNCGFTITSADYDRVLEKLKKTATGWMTTINGKELKVEGQITYYNRYKRQNVVKDLSVELDRLSEESVNNDISSWTKGRSGEALSLLKKRFSHRPVQEKFVCLNCGFETHADEQAALNIARSWLFLRSQEYKKYQTNKTTGNTDKRAFVETWQSFYRKKLKEVWKPAV

SEQ ID NO: 70 - protein, 978 aa, synthetic construct
MQEIKRINKIRRRLVKDSNTKKAGKTGPMKTLLVRVMTPDLRERLENLRKKPENIPQPISNTSRANLNKLLTDYTEMKKAILHVYWEEFQKDPVGLMSRVAQPAPKNIDQRKLIPVKDGNERLTSSGFACSQCCQPLYVYKLEQVNDKGKPHTNYFGRCNVSEHERLILLSPHKPEANDELVTYSLGKFGQRALDFYSIHVTRESNHPVKPLEQIGGNSCASGPVGKALSDACMGAVASFLTKYQDIILEHQKVIKKNEKRLANLKDIASANGLAFPKITLPPQPHTKEGIEAYNNVVAQIVIWVNLNLWQKLKIGRDEAKPLQRLKGFPSFPLVERQANEVDWWDMVCNVKKLINEKKEDGKVFWQNLAGYKRQEALLPYLSSEEDRKKGKKFARYQFGDLLLHLEKKHGEDWGKVYDEAWERIDKKVEGLSKHIKLEEERRSEDAQSKAALTDWLRAKASFVIEGLKEADKDEFCRCELKLQKWYGDLRGKPFAIEAENSILDISGFSKQYNCAFIWQKDGVKKLNLYLIINYFKGGKLRFKKIKPEAFEANRFYTVINKKSGEIVPMEVNFNFDDPNLIILPLAFGKRQGREFIWNDLLSLETGSLKLANGRVIEKTLYNRRTRQDEPALFVALTFERREVLDSSNIKPMNLIGIDRGENIPAVIALTDPEGCPLSRFKDSLGNPTHILRIGESYKEKQRTIQAAKEKEQRRAGGYSRKYASKAKNLADDMVRNTARDLLYYAVTQDAMLIFENLSRGFGRQGKRTFMAERQYTRMEDWLTAKLAYEGLPSKTYLSKTLAQYTSKTCSNCGFTITSADYDRVLEKLKKTATGWMTTINGKELKVEGQITYYNRYKRQNVVKDLSVELDRLSEESVNNDISSWTKGRSGEALSLLKKRFSHRPVQEKFVCLNCGFETHADEQAALNIARSWLFLRSQEYKKYQTNKTTGNTDKRAFVETWQSFYRKKLKEVWKPAV

SEQ ID NO: 71 - protein, 977 aa, synthetic construct
MQEIKRINKIRRRLVKDSNTKKAGKTGPMKTLLVRVMTPDLRERLENLRKKPENIPQPISNTSRANLNKLLTDYTEMKKAILHVYWEEFQKDPVGLMSRVAQPAPKNIDQRKLIPVKDGNERLTSSGFACSQCCQPLYVYKLEQVNDKGKPHTNYFGRCNVSEHERLILLSPHKPEANDELVTYSLGKFGQRALDFYSIHVTRESNHPVKPLEQIGGNSCASGPVGKALSDACMGAVASFLTKYQDIILEHQKVIKKNEKRLANLKDIASANGLAFPKITLPPQPHTKEGIEAYNNVVAQIVIWVNLNLWQKLKIGRDEAKPLQRLKGFPSFPLVERQANEVDWWDMVCNVKKLINEKKEDGKVFWQNLAGYKRQEALRPYLSSEEDRKKGKKFARYQFGDLLLHLEKKHGEDWGKVYDEAWERIDKKVEGLSKHIKLEEERRSEDAQSKAALTDWLRAKASFVIEGLKEADKDEFKRCELKLQKWYGDLRGKPFAIEAENSILDISGFSKQYNCAFIWQKDGVKKLNLYLIINYFKGGKLRFKKIKPEAFEANRFYTVINKKSGEIVPMEVNFNFDDPNLIILPLAFGKRQGREFIWNDLLSLETGSLKLANGRVIEKTLYNRRTRQDEPALFVALTFERREVLDSSNIKPMNLIGIDRGENIPAVIALTDPEGCPLSRFKDSLGNPTHILRIGESYKEKQRTIQAKKEVEQRRAGGYSRKYASKAKNLADDMVRNTARDLLYYAVTQDAMLIFENLSRGFGRQGKRTFMAERQYTRMEDWLTAKLAYEGLSKTLLSKTLAQYTSKTCSNCGFTITSADYDRVLEKLKKTATGWMTTINGKELKVEGQITYYNRYKRQNVVKDLSVELDRLSEESVNNDISSWTKGRSGEALSLLKKRFSHRPVQEKFVCLNCGFETHADEQAALNIARSWLFLRSQEYKKYQTNKTTGNTDKRAFVETWQSFYRKKLKEVWKPAV

SEQ ID NO: 72 - protein, 977 aa, synthetic construct
MQEIKRINKIRRRLVKDSNTKKAGKTGPMKTLLVRVMTPDLRERLENLRKKPENIPQPISNTSRANLNKLLTDYTEMKKAILHVYWEEFQKDPVGLMSRVAQPAPKNIDQRKLIPVKDGNERLTSSGFACSQCCQPLYVYKLEQVNDKGKPHTNYFGRCNVSEHERLILLSPHKPEANDELVTYSLGKFGQRALDFYSIHVTRESNHPVKPLEQIGGNSCASGPVGKALSDACMGAVASFLTKYQDIILEHQKVIKKNEKRLANLKDIASANGLAFPKITLPPQPHTKEGIEAYNNVVAQIVIWVNLNLWQKLKIGRDEAKPLQRLKGFPSFPLVERQANEVDWWDMVCNVKKLINEKKEDGKVFWQNLAGYKRQEALRPYLSSEEDRKKGKKFARYQFGDLLLHLEKKHGEDWGKVYDEAWERIDKKVEGLSKHIKLEEERRSEDAQSKAALTDWLRAKASFVIEGLKEADKDEFCRCELKLQKWYGDLRGKPFAIEAENSILDISGFSKQYNCAFIWQKDGVKKLNLYLIINYFKGGKLRFKKIKPEAFEANRFYTVINKKSGEIVPMEVNFNFDDPNLIILPLAFGKRQGREFIWNDLLSLETGSLKLANGRVIEKTLYNRRTRQDEPALFVALTFERREVLDSSNIKPMNLIGIDRGENIPAVIALTDPEGCPLSRFKDSLGNPTHILRIGESYKEKQRTIQAKKEVEQRRAGGYSRKYASKAKNLADDMVRNTARDLLYYAVTQDAMLIFENLSRGFGRQGKRTFMAERQYTRMEDWLTAKLAYEGLSKTYLSKTLAQYTSKTCSNCGFTITSADYDRVLEKLKKTATGWMTTINGKELKVEGQITYYNRYKRQNVVKDLSVELDRLSEESVNNDISSWTKGRSGEALSLLKKRFSHRPVQEKFVCLNCGFETHADEQAALNIARSWLFLRSQEYKKYQTNKTTGNTDKRAFVETWQSFYRKKLKEVWKPAV

SEQ ID NO: 73 - protein, 977 aa, synthetic construct
MQEIKRINKIRRRLVKDSNTKKAGKTGPMKTLLVRVMTPDLRERLENLRKKPENIPQPISNTSRANLNKLLTDYTEMKKAILHVYWEEFQKDPVGLMSRVAQPAPKNIDQRKLIPVKDGNERLTSSGFACSQCCQPLYVYKLEQVNDKGKPHTNYFGRCNVSEHERLILLSPHKPEANDELVTYSLGKFGQRALDFYSIHVTRESNHPVKPLEQIGGNSCASGPVGKALSDACMGAVASFLTKYQDIILEHQKVIKKNEKRLANLKDIASANGLAFPKITLPPQPHTKEGIEAYNNVVAQIVIWVNLNLWQKLKIGRDEAKPLQRLKGFPSFPLVERQANEVDWWDMVCNVKKLINEKKEDGKVFWQNLAGYKRQEALRPYLSSEEDRKKGKKFARYQFGDLLLHLEKKHGEDWGKVYDEAWERIDKKVEGLSKHIKLEEERRSEDAQSKAALTDWLRAKASFVIEGLKEADKDEFKRCELKLQKWYGDLRGKPFAIEAENSILDISGFSKQYNCAFIWQKDGVKKLNLYLIINYFKGGKLRFKKIKPEAFEANRFYTVINKKSGEIVPMEVNFNFDDPNLIILPLAFGKRQGREFIWNDLLSLETGSLKLANGRVIEKTLYNRRTRQDEPALFVALTFERREVLDSSNIKPMNLIGIDRGENIPAVIALTDPEGCPLSRFKDSLGNPTHILRIGESYKEKQRTIQAKKEVEQRRAGGYSRKYASKAKNLADDMVRNTARDLLYYAVTQDAMLIFENLSRGFGRQGKRTFNAERQYTRMEDWLTAKLAYEGLSKTYLSKTLAQYTSKTCSNCGFTITSADYDRVLEKLKKTATGWMTTINGKELKVEGQITYYNRYKRQNVVKDLSVELDRLSEESVNNDISSWTKGRSGEALSLLKKRFSHRPVQEKFVCLNCGFETHADEQAALNIARSWLFLRSQEYKKYQTNKTTGNTDKRAFVETWQSFYRKKLKEVWKPAV

SEQ ID NO: 74 - protein, 977 aa, synthetic construct
MQEIKRINKIRRRLVKDSNTKKAGKTGPMKTLLVRVMTPDLRERLENLRKKPENIPQPISNTSRANLNKLLTDYTEMKKAILHVYWEEFQKDPVGLMSRVAQPAPKNIDQRKLIPVKDGNERLTSSGFACSQCCQPLYVYKLEQVNDKGKPHTNYFGRCNVSEHERLILLSPHKPEANDELVTYSLGKFGQRALDFYSIHVTRESNHPVKPLEQIGGNSCASGPVGKALSDACMGAVASFLTKYQDIILEHQKVIKKNEKRLANLKDIASANGLAFPKITLPPQPHTKEGIEAYNNVVAQIVIWVNLNLWQKLKIGRDEAKPLQRLKGFPSFPLVERQANEVDWWDMVCNVKKLINEKKEDGKVFWQNLAGYKRQEALLPYLSSESDRKKGKKFARYQFGDLLLHLEKKHGEDWGKVYDEAWERIDKKVEGLSKHIKLEEERRSEDAQSKAALTDWLRAKASFVIEGLKEADKDEFCRCELKLQKWYGDLRGKPFAIEAENSILDISGFSKQYNCAFIWQKDGVKKLNLYLIINYFKGGKLRFKKIKPEAFEANRFYTVINKKSGEIVPMEVNFNFDDPNLIILPLAFGKRQGREFIWNDLLSLETGSLKLANGRVIEKTLYNRRTRQDEPALFVALTFERREVLDSSNIKPMNLIGIDRGENIPAVIALTDPEGCPLSRFKDSLGNPTHILRIGESYKEKQRTIQAKKEVEQRRAGGYSRKYASKAKNLADDMVRNTARDLLYYAVTQDAMLIFENLSRGFGRQGKRTFMAERQYTRMEDWLTAKLAYEGLSKTYLSKTLAQYTSKTCSNCGFTITSADYDRVLEKLKKTATGWMTTINGKELKVEGQITYYNRYKRQNVVKDLSVELDRLSEESVNNDISSWTKGRSGEALSLLKKRFSHRPVQEKFVCLNCGFETHADEQAALNIARSWLFLRSQEYKKYQTNKTTGNTDKRAFVETWQSFYRKKLKEVWKPAV

SEQ ID NO: 75 - protein, 977 aa, synthetic construct
MQEIKRINKIRRRLVKDSNTKKAGKTGPMKTLLVRVMTPDLRERLENLRKKPENIPQPISNTSRANLNKLLTDYTEMKKAILHVYWEEFQKDPVGLMSRVAQPAPKNIDQRKLIPVKDGNERLTSSGFACSQCCQPLYVYKLEQVNDKGKPHTNYFGRCNVSEHERLILLSPHKPEANDELVTYSLGKFGQRALDFYSIHVTRESNHPVKPLEQIGGNSCASGPVGKALSDACMGAVASFLTKYQDIILEHQKVIKKNEKRLANLKDIASANGLAFPKITLPPQPHTKEGIEAYNNVVAQIVIWVNLNLWQKLKIGRDEAKPLQRLKGFPSFPLVERQANEVDWWDMVCNVKKLINEKKEDGKVFWQNLAGYKRQEALRPYLSSEEDRKKGKKFARYQFGDLLLHLEKKHGEDWGKVYDEAWERIDKKVEGLSKHIKLEEERRSEDAQSKAALTDWLRAKASFVIEGLKEADKDEFKRCELKLQKWYGDLRGKPFAIEAENSILDISGFSKQYNCAFIWQKDGVKKLNLYLIINYFKGGKLRFKKIKPEAFEANRFYTVINKKSGEIVPMEVNFNFDDPNLIILPLAFGKRQGREFIWNDLLSLETGSLKLANGRVIEKTLYNRRTRQDEPALFVALTFERREVLDSSNIKPMNLIGIDRGENIPAVIALTDPEGCPLSRFKDSLGNPTHILRIGESYKEKQRTIQAKKEVEQRRAGGYSRKYASKAKNLADDMVRNTARDLLYYAVTQDAMLIFENLSRGFGRQGKRTFMAERQYTRMEDWLTAKLAYEGLSKTYLSKTLAQYTSKTCSNCGFTITSADYDRVLEKLKKTATGWMTTINGKELKVEGQITYYNRYKRQNVVKDLSVELDRLSEESVNNDISSWTKGRSGEALSLLKKRFSHRPVQEKFVCLNCGFETHADEQAALNIARSWLFLRSQEYKKYQTNKTTGNTDKRAFVETWQSFYRKKLKEVWKPAV

SEQ ID NO: 76 - protein, 978 aa, synthetic construct
MQEIKRINKIRRRLVKDSNTKKAGKTGPMKTLLVRVMTPDLRERLENLRKKPENIPQPISNTSRANLNKLLTDYTEMKKAILHVYWEEFQKDPVGLMSRVAQPAPKNIDQRKLIPVKDGNERLTSSGFACSQCCQPLYVYKLEQVNDKGKPHTNYFGRCNVSEHERLILLSPHKPEANDELVTYSLGKFGQRALDFYSIHVTRESNHPVKPLEQIGGNSCASGPVGKALSDACMGAVASFLTKYQDIILEHQKVIKKNEKRLANLKDIASANGLAFPKITLPPQPHTKEGIEAYNNVVAQIVIWVNLNLWQKLKIGRDEAKPLQRLKGFPSFPLVERQANEVDWWDMVCNVKKLINEKKEDGKVFWQNLAGYKRQEALLPYLSSEEDRKKGKKFARYQFGDLLLHLEKKHGEDWGKVYDEAWERIDKKVEGLSKHIKLEEERRSEDAQSKAALTDWLRAKASFVIEGLKEADKDEFCRCELKLQKWYGDLRGKPFAIEAENSILDISGFSKQYNCAFIWQKDGVKKLNLYLIINYFKGGKLRFKKIKPEAFEANRFYTVINKKSGEIVPMEVNFNFDDPNLIILPLAFGKRQGREFIWNDLLSLETGSLKLANGRVIEKTLYNRRTRQDEPALFVALTFERREVLDSSNIKPMNLIGIDRGENIPAVIALTDPEGCPLSRFKDSLGNPTHILRIGESYKEKQRTIQAAKEVEQRRAGGYSRKYASKAKNLADDMVRNTARDLLYYAVTQDAMLIFENLSRGFGRQGKRTFMAERQYTRMEDWLTAKLAYEGDPSKTYLSKTLAQYTSKTCSNCGFTITSADYDRVLEKLKKTATGWMTTINGKELKVEGQITYYNRYKRQNVVKDLSVELDRLSEESVNNDISSWTKGRSGEALSLLKKRFSHRPVQEKFVCLNCGFETHADEQAALNIARSWLFLRSQEYKKYQTNKTTGNTDKRAFVETWQSFYRKKLKEVWKPAV

SEQ ID NO: 77 - protein, 978 aa, synthetic construct
MQEIKRINKIRRRLVKDSNTKKAGKTGPMKTLLVRVMTPDLRERLENLRKKPENIPQPISNTSRANLNKLLTDYTEMKKAILHVYWEEFQKDPVGLMSRVAQPAPKNIDQRKLIPVKDGNERLTSSGFACSQCCQPLYVYKLEQVNDKGKPHTNYFGRCNVSEHERLILLSPHKPEANDELVTYSLGKFGQRALDFYSIHVTRESNHPVKPLEQIGGNSCASGPVGKALSDACMGAVASFLTKYQDIILEHQKVIKKNEKRLANLKDIASANGLAFPKITLPPQPHTKEGIEAYNNVVAQIVIWVNLNLWQKLKIGRDEAKPLQRLKGFPSFPLVERQANEVDWWDMVCNVKKLINEKKEDGKVFWQNLAGYKRQEALLPYLSSEEDRKKGKKFARYQFGDLLLHLEKKHGEDWGKVYDEAWERIDKKVEGLSKHIKLEEERRSEDAQSKAALTDWLRAKASFVIEGLKEADKDEFCRCELKLQKWYGDLRGKPFAIEAENSILDISGFSKQYNCAFIWQKDGVKKLNLYLIINYFKGGKLRFKKIKPEAFEANRFYTVINKKSGEIVPMEVNFNFDDPNLIILPLAFGKRQGREFIWNDLLSLETGSLKLANGRVIEKTLYNRRTRQDEPALFVALTFERREVLDSSNIKPMNLIGIDRGENIPAVIALTDPEGCPLSRFKDSLGNPTHILRIGESYKEKQRTIQAAKEVEQRRAGGYSRKYASKAKNLADDMVRNTARDLLYYAVTQDAMLIFENLSRGFGRQGKRTFMAERQYTRMEDWLTAKLAYEFLPSKTYLSKTLAQYTSKTCSNCGFTITSADYDRVLEKLKKTATGWMTTINGKELKVEGQITYYNRYKRQNVVKDLSVELDRLSEESVNNDISSWTKGRSGEALSLLKKRFSHRPVQEKFVCLNCGFETHADEQAALNIARSWLFLRSQEYKKYQTNKTTGNTDKRAFVETWQSFYRKKLKEVWKPAV

SEQ ID NO: 78 - protein, 977 aa, synthetic construct
MQEIKRINKIRRRLVKDSNTKKAGKTGPMKTLLVRVMTPDLRERLENLRKKPENIPQPISNTSRANLNKLLTDYTEMKKAILHVYWEEFQKDPVGLMSRVAQPAPKNIDQRKLIPVKDGNERLTSSGFACSQCCQPLYVYKLEQVNDKGKPHTNYFGRCNVSEHERLILLSPHKPEANDELVTYSLGKFGQRALDFYSIHVTRESNHPVKPLEQIGGNSCASGPVGKALSDACMGAVASFLTKYQDIILEHQKVIKKNEKRLANLKDIASANGLAFPKITLPPQPHTKEGIEAYNNVVAQIVIWVNLNLWQKLKIGRDEAKPLQRLKGFPSFPLVERQANEVDWWDMVCNVKKLINEKKEDGKVFWQNLAGYKRQEALLPYLSSEEDRKKGKKFARYQFGDLLLHLEKKHGEDWGKVYDEAWERIDKKVEGLSKHIKLEEERRSEDAQSKAALTDWLRAKASFVIEGLKEADKDEFCRCELKLQKWYGDLRGKPFAIEAENSILDISGFSKQYNCAFIWQKDGVKKLNLYLIINYFKGGKLRFKKIKPEAFEANRFYTVINKKSGEIVPMEVNFNFDDPNLIILPLAFGKRQGREFIWNDLLSLETGSLKLANGRVIEKTLYNRRTRQDEPALFVALTFERREVLDSSNIKPMNLIGIDRGENIPAVIALTDPEGCPLSRFKDSLGNPTHILRIGESYKEKQRTIQAKKEVEQRRAGGYSRKYASKAKNLADDMVRNTVRDLLYYAVTQDAMLIFENLSRGFGRQGKRTFMAERQYTRMEDWLTAKLAYEGLSKTYLSKTLAQYTSKTCSNCGFTITSADYDRVLEKLKKTATGWMTTINGKELKVEGQITYYNRYKRQNVVKDLSVELDRLSEESVNNDISSWTKGRSGEALSLLKKRFSHRPVQEKFVCLNCGFETHADEQAALNIARSWLFLRSQEYKKYQTNKTTGNTDKRAFVETWQSFYRKKLKEVWKPAV

SEQ ID NO: 79 - protein, 977 aa, synthetic construct
MQEIKRINKIRRRLVKDSNTKKAGKTGPMKTLLVRVMTPDLRERLENLRKKPENIPQPISNTSRANLNKLLTDYTEMKKAILHVYWEEFQKDPVGLMSRVAQPAPKNIDQRKLIPVKDGNERLTSSGFACSQCCQPLYVYKLEQVNDKGKPHTNYFGRCNVSEHERLILLSPHKPEANDELVTYSLGKFGQRALDFYSIHVTRESNHPVKPLEQIGGNSCASGPVGKALSDACMGAVASFLTKYQDIILEHQKVIKKNEKRLANLKDIASANGLAFPKITLPPQPHTKEGIEAYNNVVAQIVIWVNLNLWQKLKIGRDEAKPLQRLKGFPSFPLVERQANEVDWWDMVCNVKKLINEKKEDGKVFWQNLAGYKRQEALRPYLSSEEDRKKGKKFARYQFGDLLLHLEKKHGEDWGKVYDEAWERIDKKVEGLSKHIKLEEERRSEDAQSKAALTDWLRAKASFVIEGLKEADKDEFCRCELKLQKWYGDLRGKPFAIEAENSILDISGFSKQYNCAFIWQKDGVKKLNLYLIINYFKGGKLRFKKIKPEAFEANRFYTVINKKSGEIVPMEVNFNFDDPNLIILPLAFGKRQGREFIWNDLLSLETGSLKLANGRVIEKTLYNRRTRQDEPALFVALTFERREVLDSSNIKPMNLIGIDRGENIPAVIALTDPEGCPLSRFKDSLGNPTHILRIGESYKEKQRTIQAKKEVEQRRAGGYSRKYASKAKNLADDMVRNTVRDLLYYAVTQDAMLIFENLSRGFGRQGKRTFMAERQYTRMEDWLTAKLAYEGLSKTYLSKTLAQYTSKTCSNCGFTITSADYDRVLEKLKKTATGWMTTINGKELKVEGQITYYNRYKRQNVVKDLSVELDRLSEESVNNDISSWTKGRSGEALSLLKKRFSHRPVQEKFVCLNCGFETHADEQAALNIARSWLFLRSQEYKKYQTNKTTGNTDKRAFVETWQSFYRKKLKEVWKPAV

SEQ ID NO: 80 - protein, 977 aa, synthetic construct
MQEIKRINKIRRRLVKDSNTKKAGKTGPMKTLLVRVMTPDLRERLENLRKKPENIPQPISNTSRANLNKLLTDYTEMKKAILHVYWEEFQKDPVGLMSRVAQPAPKNIDQRKLIPVKDGNERLTSSGFACSQCCQPLYVYKLEQVNDKGKPHTNYFGRCNVSEHERLILLSPHKPEANDELVTYSLGKFGQRALDFYSIHVTRESNHPVKPLEQIGGNSCASGPVGKALSDACMGAVASFLTKYQDIILEHQKVIKKNEKRLANLKDIASANGLAFPKITLPPQPHTKEGIEAYNNVVAQIVIWVNLNLWQKLKIGRDEAKPLQRLKGFPSFPLVERQANEVDWWDMVCNVKKLINEKKEDGKVFWQNLAGYKRQEALLPYLSSEEDRKKGKKFARYQFGDLLLHLEKKHGEDWGKVYDEAWERIDKKVEGLSKHIKLEEERRSEDAQSKAALTDWLRAKASFVIEGLKEADKDEFKRCELKLQKWYGDLRGKPFAIEAENSILDISGFSKQYNCAFIWQKDGVKKLNLYLIINYFKGGKLRFKKIKPEAFEANRFYTVINKKSGEIVPMEVNFNFDDPNLIILPLAFGKRQGREFIWNDLLSLETGSLKLANGRVIEKTLYNRRTRQDEPALFVALTFERREVLDSSNIKPMNLIGIDRGENIPAVIALTDPEGCPLSRFKDSLGNPTHILRIGESYKEKQRTIQAKKEVEQRRAGGYSRKYASKAKNLADDMVRNTARDLLYYAVTQDAMLIFENLSRGFGRQGKRTFMAERQYTRMEDWLTAKLAYEGLSKTYLSKTLAQYTSKTCSNCGFTITSADYDRVLEKLKKTATGWMTTINGKELKVEGQITYYNRYKRQNVVKDLSVELDRLSEESVNNDISSWTKGRSGEALSLLKKRFSHRPVQEKFVCLNCGFETHADEQAALNIARSWLFLRSQEYKKYQTNKTTGNTDKRAFVETWQSFYRKKLKEVWKPAV

SEQ ID NO: 81 - protein, 978 aa, synthetic construct
MQEIKRINKIRRRLVKDSNTKKAGKTGPMKTLLVRVMTPDLRERLENLRKKPENIPQPISNTSRANLNKLLTDYTEMKKAILHVYWEEFQKDPVGLMSRVAQPAPKNIDQRKLIPVKDGNERLTSSGFACSQCCQPLYVYKLEQVNDKGKPHTNYFGRCNVSEHERLILLSPHKPEANDELVTYSLGKFGQRALDFYSIHVTRESNHPVKPLEQIGGNSCASGPVGKALSDACMGAVASFLTKYQDIIIEHQKVIKKNEKRLANLKDIASANGLAFPKITLPPQPHTKEGIEAYNNVVAQIVIWVNLNLWQKLKIGRDEAKPLQRLKGFPSFPLVERQANEVDWWDMVCNVKKLINEKKEDGKVFWQNLAGYKRQEALLPYLSSEEDRKKGKKFARYQFGDLLLHLEKKHGEDWGKVYDEAWERIDKKVEGLSKHIKLEEERRSEDAQSKAALTDWLRAKASFVIEGLKEADKDEFCRCELKLQKWYGDLRGKPFAIEAENSILDISGFSKQYNCAFIWQKDGVKKLNLYLIINYFKGGKLRFKKIKPEAFEANRFYTVINKKSGEIVPMEVNFNFDDPNLIILPLAFGKRQGREFIWNDLLSLETGSLKLANGRVIEKTLYNRRTRQDEPALFVALTFERREVLDSSNIKPMNLIGIDRGENIPAVIALTDPEGCPLSRFKDSLGNPTHILRIGESYKEKQRTIQAAKEVEQRRAGGYSRKYASKAKNLADDMVRNTARDLLYYAVTQDAMLIFENLSRGFGRQGKRTFNAERQYTRMEDWLTAKLAYEGLPSKTYLSKTLAQYTSKTCSNCGFTITSADYDRVLEKLKKTATGWMTTINGKELKVEGQITYYNRYKRQNVVKDLSVELDRLSEESVNNDISSWTKGRSGEALSLLKKRFSHRPVQEKFVCLNCGFETHADEQAALNIARSWLFLRSQEYKKYQTNKTTGNTDKRAFVETWQSFYRKKLKEVWKPAV

SEQ ID NO: 82 - protein, 978 aa, synthetic construct
MQEIKRINKIRRRLVKDSNTKKAGKTGPMKTLLVRVMTPDLRERLENLRKKPENIPQPISNTSRANLNKLLTDYTEMKKAILHVYWEEFQKDPVGLMSRVAQPAPKNIDQRKLIPVKDGNERLTSSGFACSQCCQPLYVYKLEQVNDKGKPHTNYFGRCNVSEHERLILLSPHKPEANDELVTYSLGKFGQRALDFYSIHVTRESNHPVKPLEQIGGNSCASGPVGKALSDACMGAVASFLTKYQDIILEHQKVIKKNEKRLANLKDIASANGLAFPKITLPPQPHTKEGIEAYNNVVAQIVIWVNLNLWQKLKIGRDEAKPLQRLKGFPSFPLVERQANEVDWWDMVCNVKKLINEKKEDGKVFWQNLAGYKRQEALLPYLSSEEDRKKGKKFARYQFGDLLLHLEKKHGEDWGKVYDEAWERIDKKVEGLSKHIKLEEERRSEDAQSKAALTDWLRAKASFVIEGLKEADKDEFCRCELKLQKWYGDLRGKPFAIEAENSILDISGFSKQYNCAFIWQKDGVKKLNLYLIINYFKGGKLRFKKIKPEAFEANRFYTVINKKSGEIVPMEVNFNFDDPNLIILPLAFGKRQGREFIWNDLLSLETGSLKLANGRVIEKTLYNRRTRQDEPALFVALTFERREVLDSSNIKPMNLIGIDRGENIPAVIALTDPEGCPLSRFKDSLGNPTHILRIGESYKEKQRTIQAAKEVEQRRAGGYSRKYASKAKNLADDMVRNTARDLLYYAKTQDAMLIFENLSRGFGRQGKRTFMAERQYTRMEDWLTAKLAYEGLPSKTYLSKTLAQYTSKTCSNCGFTITSADYDRVLEKLKKTATGWMTTINGKELKVEGQITYYNRYKRQNVVKDLSVELDRLSEESVNNDISSWTKGRSGEALSLLKKRFSHRPVQEKFVCLNCGFETHADEQAALNIARSWLFLRSQEYKKYQTNKTTGNTDKRAFVETWQSFYRKKLKEVWKPAV

SEQ ID NO: 83 - protein, 977 aa, synthetic construct
MQEIKRINKIRRRLVKDSNTKKAGKTGPMKTLLVRVMTPDLRERLENLRKKPENIPQPISNTSRANLNKLLTDYTEMKKAILHVYWEEFQKDPVGLMSRVAQPAPKNIDQRKLIPVKDGNERLTSSGFACSQCCQPLYVYKLEQVNDKGKPHTNYFGRCNVSEHERLILLSPHKPEANDELVTYSLGKFGQRALDFYSIHVTRESNHPVKPLEQIGGNSCASGPVGKALSDACMGAVASFLTKYQDIILEHQKVIKKNEKRLANLKDIASANGLAFPKITLPPQPHTKEGIEAYNNVVAQIVIWVNLNLWQKLKIGRDEAKPLQRLKGFPSFPLVERQANEVDWWDMVCNVKKLINEKKEDGKVFWQNLAGYKRQEALRPYLSSEEDRKKGKKFARYQFGDLLLHLEKKHGEDWGKVYDEAWERIDKKVEGLSKHIKLEEERRSEDAQSKAALTDWLRAKASFVIEGLKEADKDEFKRCELKLQKWYGDLRGKPFAIEAENSILDISGFSKQYNCAFIWQKDGVKKLNLYLIINYFKGGKLRFKKIKPEAFEANRFYTVINKKSGEIVPMEVNFNFDDPNLIILPLAFGKRQGREFIWNDLLSLETGSLKLANGRVIEKTLYNRRTRQDEPALFVALTFERREVLDSSNIKPMNLIGIDRGENIPAVIALTDPEGCPLSRFKDSLGNPTHILRIGESYKEKQRTIQAKKEVEQRRAGGYSRKYASKAKNLADDMVRNTARDLLYYAVTQDAMLIFENLSRGFGRQGKRTFMAERQYTRNEDWLTAKLAYEGLSKTYLSKTLAQYTSKTCSNCGFTITSADYDRVLEKLKKTATGWMTTINGKELKVEGQITYYNRYKRQNVVKDLSVELDRLSEESVNNDISSWTKGRSGEALSLLKKRFSHRPVQEKFVCLNCGFETHADEQAALNIARSWLFLRSQEYKKYQTNKTTGNTDKRAFVETWQSFYRKKLKEVWKPAV

SEQ ID NO: 84 - protein, 978 aa, synthetic construct
MQEIKRINKIRRRLVKDSNTKKAGKTGPMKTLLVRVMTPDLRERLENLRKKPENIPQPISNTSRANLNKLLTDYTEMKKAILHVYWEEFQKDPVGLMSRVAQPAPKNIDQRKLIPVKDGNERLTSSGFACSQCCQPLYVYKLEQVNDKGKPHTNYFGRCNVSEHERLILLSPHKPEANDELVTYSLGKFGQRALDFYSIHVTRESNHPVKPLEQIGGNSCASGPVGKALSDACMGAVASFLTKYQDIILEHQKVIKKNEKRLANLKDIASANGLAFPKITLPPQPHTKEGIEAYNNVVAQIVIWVNLNLWQKLKIGRDEAKPLQRLKGFPSFPLVERQANEVDWWDMVCNVKKLINEKKEDGKVFWQNLAGYKRQEALLPYLSSEEDRKKGKKFARYQFGDLLLHLEKKHGEDWGKVYDEAWERIDKKVEGLSKHIKLEEERRSEDAQSKAALTDWLRAKASFVIEGLKEADKDEFCRCELKLQKWYGDLRGKPFAIEAENSILDISGFSKQYNCAFIWQKDGVKKLNLYLIINYFKGGKLRFKKIKPEAFEANRFYTVINKKSGEIVPMEVNFNFDDPNLIILPLAFGKRQGREFIWNDLLSLETGSLKLANGRVIEKTLYNRRTRQDEPALFVALTFERREVLDSSNIKPMNLIGIDRGENIPAVIALTDPEGCPLSRFKDSLGNPTHILRIGESYKEKQRTIQAAKEVEQRRAGGYSRKYASKAKNLADDMVRNTARDLLYYAVTQDAMLIMENLSRGFGRQGKRTFMAERQYTRMEDWLTAKLAYEGLPSKTYLSKTLAQYTSKTCSNCGFTITSADYDRVLEKLKKTATGWMTTINGKELKVEGQITYYNRYKRQNVVKDLSVELDRLSEESVNNDISSWTKGRSGEALSLLKKRFSHRPVQEKFVCLNCGFETHADEQAALNIARSWLFLRSQEYKKYQTNKTTGNTDKRAFVETWQSFYRKKLKEVWKPAV

SEQ ID NO: 85 - protein, 977 aa, synthetic construct
MQEIKRINKIRRRLVKDSNTKKAGKTGPMKTLLVRVMTPDLRERLENLRKKPENIPQPISNTSRANLNKLLTDYTEMKKAILHVYWEEFQKDPVGLMSRVAQPAPKNIDQRKLIPVKDGNERLTSSGFACSQCCQPLYVYKLEQVNDKGKPHTNYFGRCNVSEHERLILLSPHKPEANDELVTYSLGKFGQRALDFYSIHVTRESNHPVKPLEQIGGNSCASGPVGKALSDACMGAVASFLTKYQDIILEHQKVIKKNEKRLANLKDIASANGLAFPKITLPPQPHTKEGIEAYNNVVAQIVIWVNLNLWQKLKIGRDEAKPLQRLKGFPSFPLVERQANEVDWWDMVCNVKKLINEKKEDGKVFWQNLAGYKRQEALRPYLSSEEDRKKGKKFARYQFGDLLLHLEKKHGEDWGKVYDEAWERIDKKVEGLSKHIKLEEERRSEDAQSKAALTDWLRAKASFVIEGLKEADKDEFCRCELKLQKWYGDLRGKPFAIEAENSILDISGFSKQYNCAFIWQKDGVKKLNLYLIINYFKGGKLRFKKIKPEAFEANRFYTVINKKSGEIVPMEVNFNFDDPNLIILPLAFGKRQGREFIWNDLLSLETGSLKLANGRVIEKTLYNRRTRQDEPALFVALTFERREVLDSSNIKPMNLIGIDRGENIPAVIALTDPEGCPLSRFKDSLGNPTHILRIGESYKEKQRTIQAKKEVEQRRAGGYSRKYASKAKNLADDMVRNTARDLLYYAVTQDAMLIFENLSRGFGRQGKRTFMAERQYTRMEDWLTAKLAYEGLSKTYLSKTLAQYTSKTCSNCGFTITSADYDRVLEKLKKTATGWMTTINGKELKVEGQITYYNRRKRQNVVKDLSVELDRLSEESVNNDISSWTKGRSGEALSLLKKRFSHRPVQEKFVCLNCGFETHADEQAALNIARSWLFLRSQEYKKYQTNKTTGNTDKRAFVETWQSFYRKKLKEVWKPAV

SEQ ID NO: 86 - protein, 977 aa, synthetic construct
MQEIKRINKIRRRLVKDSNTKKAGKTGPMKTLLVRVMTPDLRERLENLRKKPENIPQPISNTSRANLNKLLTDYTEMKKAILHVYWEEFQKDPVGLMSRVAQPAPKNIDQRKLIPVKDGNERLTSSGFACSQCCQPLYVYKLEQVNDKGKPHTNYFGRCNVSEHERLILLSPHKPEANDELVTYSLGKFGQRALDFYSIHVTRESNHPVKPLEQIGGNSCASGPVGKALSDACMGAVASFLTKYQDIILEHQKVIKKNEKRLANLKDIASANGLAFPKITLPPQPHTKEGIEAYNNVVAQIVIWVNLNLWQKLKIGRDEAKPLQRLKGFPSFPLVERQANEVDWWDMVCNVKKLINEKKEDGKVFWQNLAGYKRQEALRPYLSSEEDRKKGKKFARYQFGDLLLHLEKKHGEDWGKVYDEAWERIDKKVEGLSKHIKLEEERRSEDAQSKAALTDWLRAKASFVIEGLKEADKDEFCRCELKLQKWYGDLRGKPFAIEAENSILDISGFSKQYNCAFIWQKDGVKKLNLYLIINYFKGGKLRFKKIKPEAFEANRFYTVINKKSGEIVPMEVNFNFDDPNLIILPLAFGKRQGREFIWNDLLSLETGSLKLANGRVIEKTLYNRRTRQDEPALFVALTFERREVLDSSNIKPMNLIGVDRGENIPAVIALTDPEGCPLSRFKDSLGNPTHILRIGESYKEKQRTIQAKKEVEQRRAGGYSRKYASKAKNLADDMVRNTARDLLYYAVTQDAMLIFENLSRGFGRQGKRTFMAERQYTRMEDWLTAKLAYEGLSKTYLSKTLAQYTSKTCSNCGFTITSADYDRVLEKLKKTATGWMTTINGKELKVEGQITYYNRRKRQNVVKDLSVELDRLSEESVNNDISSWTKGRSGEALSLLKKRFSHRPVQEKFVCLNCGFETHADEQAALNIARSWLFLRSQEYKKYQTNKTTGNTDKRAFVETWQSFYRKKLKEVWKPAV

SEQ ID NO: 87 - protein, 977 aa, synthetic construct
MQEIKRINKIRRRLVKDSNTKKAGKTGPMKTLLVRVMTPDLRERLENLRKKPENIPQPISNTSRANLNKLLTDYTEMKKAILHVYWEEFQKDPVGLMSRVAQPAPKNIDQRKLIPVKDGNERLTSSGFACSQCCQPLYVYKLEQVNDKGKPHTNYFGRCNVSEHERLILLSPHKPEANDELVTYSLGKFGQRALDFYSIHVTRESNHPVKPLEQIGGNSCASGPVGKALSDACMGAVASFLTKYQDIILEHQKVIKKNEKRLANLKDIASANGLAFPKITLPPQPHTKEGIEAYNNVVAQIVIWVNLNLWQKLKIGRDEAKPLQRLKGFPSFPLVERQANEVDWWDMVCNVKKLINEKKEDGKVFWQNLAGYKRQEALRPYLSSENDRKKGKKFARYQFGDLLLHLEKKHGEDWGKVYDEAWERIDKKVEGLSKHIKLEEERRSEDAQSKAALTDWLRAKASFVIEGLKEADKDEFCRCELKLQKWYGDLRGKPFAIEAENSILDISGFSKQYNCAFIWQKDGVKKLNLYLIINYFKGGKLRFKKIKPEAFEANRFYTVINKKSGEIVPMEVNFNFDDPNLIILPLAFGKRQGREFIWNDLLSLETGSLKLANGRVIEKTLYNRRTRQDEPALFVALTFERREVLDSSNIKPMNLIGVDRGENIPAVIALTDPEGCPLSRFKDSLGNPTHILRIGESYKEKQRTIQAKKEVEQRRAGGYSRKYASKAKNLADDMVRNTARDLLYYAVTQDAMLIFENLSRGFGRQGKRTFMAERQYTRMEDWLTAKLAYEGLSKTYLSKTLAQYTSKTCSNCGFTITSADYDRVLEKLKKTATGWMTTINGKELKVEGQITYYNRRKRQNVVKDLSVELDRLSEESVNNDISSWTKGRSGEALSLLKKRFSHRPVQEKFVCLNCGFETHADEQAALNIARSWLFLRSQEYKKYQTNKTTGNTDKRAFVETWQSFYRKKLKEVWKPAV

SEQ ID NO: 88 - protein, 977 aa, synthetic construct
MQEIKRINKIRRRLVKDSNTKKAGKTGPMKTLLVRVMTPDLRERLENLRKKPENIPQPISNTSRANLNKLLTDYTEMKKAILHVYWEEFQKDPVGLMSRVAQPAPKNIDQRKLIPVKDGNERLTSSGFACSQCCQPLYVYKLEQVNDKGKPHTNYFGRCNVSEHERLILLSPHKPEANDELVTYSLGKFGQRALDFYSIHVTRESNHPVKPLEQIGGNSCASGPVGKALSDACMGAVASFLTKYQDIILEHQKVIKKNEKRLANLKDIASANGLAFPKITLPPQPHTKEGIEAYNNVVAQIVIWVNLNLWQKLKIGRDEAKPLQRLKGFPSFPLVERQANEVDWWDMVCNVKKLINEKKEDGKVFWQNLAGYKRQEALRPYLSSEEDRKKGKKFARYQFGDLLKHLEKKHGEDWGKVYDEAWERIDKKVEGLSKHIKLEEERRSEDAQSKAALTDWLRAKASFVIEGLKEADKDEFCRCELKLQKWYGDLRGKPFAIEAENSILDISGFSKQYNCAFIWQKDGVKKLNLYLIINYFKGGKLRFKKIKPEAFEANRFYTVINKKSGEIVPMEVNFNFDDPNLIILPLAFGKRQGREFIWNDLLSLETGSLKLANGRVIEKTLYNRRTRQDEPALFVALTFERREVLDSSNIKPMNLIGVDRGENIPAVIALTDPEGCPLSRFKDSLGNPTHILRIGESYKEKQRTIQAKKEVEQRRAGGYSRKYASKAKNLADDMVRNTARDLLYYAVTQDAMLIFENLSRGFGRQGKRTFMAERQYTRMEDWLTAKLAYEGLSKTYLSKTLAQYTSKTCSNCGFTITSADYDRVLEKLKKTATGWMTTINGKELKVEGQITYYNRRKRQNVVKDLSVELDRLSEESVNNDISSWTKGRSGEALSLLKKRFSHRPVQEKFVCLNCGFETHADEQAALNIARSWLFLRSQEYKKYQTNKTTGNTDKRAFVETWQSFYRKKLKEVWKPAV

SEQ ID NO: 89 - protein, 978 aa, synthetic construct
MQEIKRINKIRRRLVKDSNTKKAGKTGPMKTLLVRVMTPDLRERLENLRKKPENIPQPISNTSRANLNKLLTDYTEMKKAILHVYWEEFQKDPVGLMSRVAQPAPKNIDQRKLIPVKDGNERLTSSGFACSQCCQPLYVYKLEQVNDKGKPHTNYFGRCNVSEHERLILLSPHKPEANDELVTYSLGKFGQVRALDFYSIHVTRESNHPVKPLEQIGGNSCASGPVGKALSDACMGAVASFLTKYQDIILEHQKVIKKNEKRLANLKDIASANGLAFPKITLPPQPHTKEGIEAYNNVVAQIVIWVNLNLWQKLKIGRDEAKPLQRLKGFPSFPLVERQANEVDWWDMVCNVKKLINEKKEDGKVFWQNLAGYKRQEALRPYLSSEEDRKKGKKFARYQFGDLLLHLEKKHGEDWGKVYDEAWERIDKKVEGLSKHIKLEEERRSEDAQSKAALTDWLRAKASFVIEGLKEADKDEFCRCELKLQKWYGDLRGKPFAIEAENSILDISGFSKQYNCAFIWQKDGVKKLNLYLIINYFKGGKLRFKKIKPEAFEANRFYTVINKKSGEIVPMEVNFNFDDPNLIILPLAFGKRQGREFIWNDLLSLETGSLKLANGRVIEKTLYNRRTRQDEPALFVALTFERREVLDSSNIKPMNLIGVDRGENIPAVIALTDPEGCPLSRFKDSLGNPTHILRIGESYKEKQRTIQAKKEVEQRRAGGYSRKYASKAKNLADDMVRNTARDLLYYAVTQDAMLIFENLSRGFGRQGKRTFMAERQYTRMEDWLTAKLAYEGLSKTYLSKTLAQYTSKTCSNCGFTITSADYDRVLEKLKKTATGWMTTINGKELKVEGQITYYNRRKRQNVVKDLSVELDRLSEESVNNDISSWTKGRSGEALSLLKKRFSHRPVQEKFVCLNCGFETHADEQAALNIARSWLFLRSQEYKKYQTNKTTGNTDKRAFVETWQSFYRKKLKEVWKPAV

SEQ ID NO: 90 - protein, 977 aa, synthetic construct
MQEIKRINKIRRRLVKDSNTKKAGKTGPMKTLLVRVMTPDLRERLENLRKKPENIPQPISNTSRANLNKLLTDYTEMKKAILHVYWEEFQKDPVGLMSRVAQPAPKNIDQRKLIPVKDGNERLTSSGFACSQCCQPLYVYKLEQVNDKGKPHTNYFGRCNVSEHERLILLSPHKPEANDELVTYSLGKFGQRALDFYSIHVTRESNHPVKPLEQIGGNSCASGPVGKALSDACMGAVASFLTKYQDIILEHQKVIKKNEKRLANLKDIASANGLAFPKITLPPQPHTKEGIEAYNNVVAQIVIWVNLNLWQKLKIGRDEAKPLQRLKGFPSFPLVERQANEVDWWDMVCNVKKLINEKKEDGKVFWQNLAGYKRQEALRPYLSSENDRKKGKKFARYQFGDLLKHLEKKHGEDWGKVYDEAWERIDKKVEGLSKHIKLEEERRSEDAQSKAALTDWLRAKASFVIEGLKEADKDEFCRCELKLQKWYGDLRGKPFAIEAENSILDISGFSKQYNCAFIWQKDGVKKLNLYLIINYFKGGKLRFKKIKPEAFEANRFYTVINKKSGEIVPMEVNFNFDDPNLIILPLAFGKRQGREFIWNDLLSLETGSLKLANGRVIEKTLYNRRTRQDEPALFVALTFERREVLDSSNIKPMNLIGVDRGENIPAVIALTDPEGCPLSRFKDSLGNPTHILRIGESYKEKQRTIQAKKEVEQRRAGGYSRKYASKAKNLADDMVRNTARDLLYYAVTQDAMLIFENLSRGFGRQGKRTFMAERQYTRMEDWLTAKLAYEGLSKTYLSKTLAQYTSKTCSNCGFTITSADYDRVLEKLKKTATGWMTTINGKELKVEGQITYYNRRKRQNVVKDLSVELDRLSEESVNNDISSWTKGRSGEALSLLKKRFSHRPVQEKFVCLNCGFETHADEQAALNIARSWLFLRSQEYKKYQTNKTTGNTDKRAFVETWQSFYRKKLKEVWKPAV

SEQ ID NO: 91 - protein, 977 aa, synthetic construct
MQEIKRINKIRRRLVKDSNTKKAGKTGPMKTLLVRVMTPDLRERLENLRKKPENIPQPISNTSRANLNKLLTDYTEMKKAILHVYWEEFQKDPVGLMSRVAQPAPKNIDQRKLIPVKDGNERLTSSGFACSQCCQPLYVYKLEQVNDKGKPHTNYFGRCNVSEHERLILLSPHKPEANDELVTYSLGKFGQRALDFYSIHVTRESNHPVKPLEQIGGNSCASGPVGKALSDACMGAVASFLTKYQDIILEHQKVIKKNEKRLANLKDIASANGLAFPKITLPPQPHTKEGIEAYNNVVAQIVIWVNLNLWQKLKIGRDEAKPLQRLKGFPSFPLVERQANEVDWWDMVCNVKKLINEKKEDGKVFWQNLAGYKRQEALRPYLSSEEDRKKGKKFARYQLGDLLLHLEKKHGEDWGKVYDEAWERIDKKVEGLSKHIKLEEERRSEDAQSKAALTDWLRAKASFVIEGLKEADKDEFCRCELKLQKWYGDLRGKPFAIEAENSILDISGFSKQYNCAFIWQKDGVKKLNLYLIINYFKGGKLRFKKIKPEAFEANRFYTVINKKSGEIVPMEVNFNFDDPNLIILPLAFGKRQGREFIWNDLLSLETGSLKLANGRVIEKTLYNRRTRQDEPALFVALTFERREVLDSSNIKPMNLIGVDRGENIPAVIALTDPEGCPLSRFKDSLGNPTHILRIGESYKEKQRTIQAKKEVEQRRAGGYSRKYASKAKNLADDMVRNTARDLLYYAVTQDAMLIFENLSRGFGRQGKRTFMAERQYTRMEDWLTAKLAYEGLSKTYLSKTLAQYTSKTCSNCGFTITSADYDRVLEKLKKTATGWMTTINGKELKVEGQITYYNRRKRQNVVKDLSVELDRLSEESVNNDISSWTKGRSGEALSLLKKRFSHRPVQEKFVCLNCGFETHADEQAALNIARSWLFLRSQEYKKYQTNKTTGNTDKRAFVETWQSFYRKKLKEVWKPAV

SEQ ID NO: 92 - protein, 977 aa, synthetic construct
MQEIKRINKIRRRLVKDSNTKKAGKTGPMKTLLVRVMTPDLRERLENLRKKPENIPQPISNTSRANLNKLLTDYTEMKKAILHVYWEEFQKDPVGLMSRVAQPAPKNIDQRKLIPVKDGNERLTSSGFACSQCCQPLYVYKLEQVNDKGKPHTNYFGRCNVSEHERLILLSPHKPEANDELVTYSLGKFGQRALDFYSIHVTRESNHPVKPLEQIGGNSCASGPVGKALSDACMGAVASFLTKYQDIILEHQKVIKKNEKRLANLKDIASANGLAFPKITLPPQPHTKEGIEAYNNVVAQIVIWVNLNLWQKLKIGRDEAKPLQRLKGFPSFPLVERQANEVDWWDMVCNVKKLINEKKEDGKVFWQNLAGYKRQEALRPYLSSENDRKKGKKFARYQLGDLLLHLEKKHGEDWGKVYDEAWERIDKKVEGLSKHIKLEEERRSEDAQSKAALTDWLRAKASFVIEGLKEADKDEFCRCELKLQKWYGDLRGKPFAIEAENSILDISGFSKQYNCAFIWQKDGVKKLNLYLIINYFKGGKLRFKKIKPEAFEANRFYTVINKKSGEIVPMEVNFNFDDPNLIILPLAFGKRQGREFIWNDLLSLETGSLKLANGRVIEKTLYNRRTRQDEPALFVALTFERREVLDSSNIKPMNLIGVDRGENIPAVIALTDPEGCPLSRFKDSLGNPTHILRIGESYKEKQRTIQAKKEVEQRRAGGYSRKYASKAKNLADDMVRNTARDLLYYAVTQDAMLIFENLSRGFGRQGKRTFMAERQYTRMEDWLTAKLAYEGLSKTYLSKTLAQYTSKTCSNCGFTITSADYDRVLEKLKKTATGWMTTINGKELKVEGQITYYNRRKRQNVVKDLSVELDRLSEESVNNDISSWTKGRSGEALSLLKKRFSHRPVQEKFVCLNCGFETHADEQAALNIARSWLFLRSQEYKKYQTNKTTGNTDKRAFVETWQSFYRKKLKEVWKPAV

SEQ ID NO: 93 - protein, 977 aa, synthetic construct
MQEIKRINKIRRRLVKDSNTKKAGKTGPMKTLLVRVMTPDLRERLENLRKKPENIPQPISNTSRANLNKLLTDYTEMKKAILHVYWEEFQKDPVGLMSRVAQPAPKNIDQRKLIPVKDGNERLTSSGFACSQCCQPLYVYKLEQVNDKGKPHTNYFGRCNVSEHERLILLSPHKPEANDELVTYSLGKFGQRALDFYSIHVTRESNHPVKPLEQIGGNSCASGPVGKALSDACMGAVASFLTKYQDIILEHQKVIKKNEKRLANLKDIASANGLAFPKITLPPQPHTKEGIEAYNNVVAQIVIWVNLNLWQKLKIGRDEAKPLQRLKGFPSFPLVERQANEVDWWDMVCNVKKLINEKKEDGKVFWQNLAGYKRQEALRPYLSSEEDRKKGKKFARYQLGDLLLHLEKKHGEDWGKVYDEAWERIDKKVEGLSKHIKLEEERRSEDAQSKAALTDWLRAKASFVIEGLKEADKDEFSRCELKLQKWYGDLRGKPFAIEAENSILDISGFSKQYNCAFIWQKDGVKKLNLYLIINYFKGGKLRFKKIKPEAFEANRFYTVINKKSGEIVPMEVNFNFDDPNLIILPLAFGKRQGREFIWNDLLSLETGSLKLANGRVIEKTLYNRRTRQDEPALFVALTFERREVLDSSNIKPMNLIGVDRGENIPAVIALTDPEGCPLSRFKDSLGNPTHILRIGESYKEKQRTIQAKKEVEQRRAGGYSRKYASKAKNLADDMVRNTARDLLYYAVTQDAMLIFENLSRGFGRQGKRTFMAERQYTRMEDWLTAKLAYEGLSKTYLSKTLAQYTSKTCSNCGFTITSADYDRVLEKLKKTATGWMTTINGKELKVEGQITYYNRRKRQNVVKDLSVELDRLSEESVNNDISSWTKGRSGEALSLLKKRFSHRPVQEKFVCLNCGFETHADEQAALNIARSWLFLRSQEYKKYQTNKTTGNTDKRAFVETWQSFYRKKLKEVWKPAV

SEQ ID NO: 94 - protein, 977 aa, synthetic construct
MQEIKRINKIRRRLVKDSNTKKAGKTGPMKTLLVRVMTPDLRERLENLRKKPENIPQPISNTSRANLNKLLTDYTEMKKAILHVYWEEFQKDPVGLMSRVAQPAPKNIDQRKLIPVKDGNERLTSSGFACSQCCQPLYVYKLEQVNDKGKPHTNYFGRCNVSEHERLILLSPHKPEANDELVTYSLGKFGQRALDFYSIHVTRESNHPVKPLEQIGGNSCASGPVGKALSDACMGAVASFLTKYQDIILEHQKVIKKNEKRLANLKDIASANGLAFPKITLPPQPHTKEGIEAYNNVVAQIVIWVNLNLWQKLKIGRDEAKPLQRLKGFPSFPLVERQANEVDWWDMVCNVKKLINEKKEDGKVFWQNLAGYKRQEALRPYLSSEEDRKKGKKFARYQLGDLLKHLEKKHGEDWGKVYDEAWERIDKKVEGLSKHIKLEEERRSEDAQSKAALTDWLRAKASFVIEGLKEADKDEFCRCELKLQKWYGDLRGKPFAIEAENSILDISGFSKQYNCAFIWQKDGVKKLNLYLIINYFKGGKLRFKKIKPEAFEANRFYTVINKKSGEIVPMEVNFNFDDPNLIILPLAFGKRQGREFIWNDLLSLETGSLKLANGRVIEKTLYNRRTRQDEPALFVALTFERREVLDSSNIKPMNLIGVDRGENIPAVIALTDPEGCPLSRFKDSLGNPTHILRIGESYKEKQRTIQAKKEVEQRRAGGYSRKYASKAKNLADDMVRNTARDLLYYAVTQDAMLIFENLSRGFGRQGKRTFMAERQYTRMEDWLTAKLAYEGLSKTYLSKTLAQYTSKTCSNCGFTITSADYDRVLEKLKKTATGWMTTINGKELKVEGQITYYNRRKRQNVVKDLSVELDRLSEESVNNDISSWTKGRSGEALSLLKKRFSHRPVQEKFVCLNCGFETHADEQAALNIARSWLFLRSQEYKKYQTNKTTGNTDKRAFVETWQSFYRKKLKEVWKPAV

SEQ ID NO: 95 - protein, 977 aa, synthetic construct
MQEIKRINKIRRRLVKDSNTKKAGKTGPMKTLLVRVMTPDLRERLENLRKKPENIPQPISNTSRANLNKLLTDYTEMKKAILHVYWEEFQKDPVGLMSRVAQPAPKNIDQRKLIPVKDGNERLTSSGFACSQCCQPLYVYKLEQVNDKGKPHTNYFGRCNVSEHERLILLSPHKPEANDELVTYSLGKFGQRALDFYSIHVTRESNHPVKPLEQIGGNSCASGPVGKALSDACMGAVASFLTKYQDIILEHQKVIKKNEKRLANLKDIASANGLAFPKITLPPQPHTKEGIEAYNNVVAQIVIWVNLNLWQKLKIGRDEAKPLQRLKGFPSFPLVERQANEVDWWDMVCNVKKLINEKKEDGKVFWQNLAGYKRQEALRPYLSSENDRKKGKKFARYQLGDLLKHLEKKHGEDWGKVYDEAWERIDKKVEGLSKHIKLEEERRSEDAQSKAALTDWLRAKASFVIEGLKEADKDEFSRCELKLQKWYGDLRGKPFAIEAENSILDISGFSKQYNCAFIWQKDGVKKLNLYLIINYFKGGKLRFKKIKPEAFEANRFYTVINKKSGEIVPMEVNFNFDDPNLIILPLAFGKRQGREFIWNDLLSLETGSLKLANGRVIEKTLYNRRTRQDEPALFVALTFERREVLDSSNIKPMNLIGVDRGENIPAVIALTDPEGCPLSRFKDSLGNPTHILRIGESYKEKQRTIQAKKEVEQRRAGGYSRKYASKAKNLADDMVRNTARDLLYYAVTQDAMLIFENLSRGFGRQGKRTFMAERQYTRMEDWLTAKLAYEGLSKTYLSKTLAQYTSKTCSNCGFTITSADYDRVLEKLKKTATGWMTTINGKELKVEGQITYYNRRKRQNVVKDLSVELDRLSEESVNNDISSWTKGRSGEALSLLKKRFSHRPVQEKFVCLNCGFETHADEQAALNIARSWLFLRSQEYKKYQTNKTTGNTDKRAFVETWQSFYRKKLKEVWKPAV

SEQ ID NO: 96 - protein, 977 aa, synthetic construct
MQEIKRINKIRRRLVKDSNTKKAGKTGPMKTLLVRVMTPDLRERLENLRKKPENIPQPISNTSRANLNKLLTDYTEMKKAILHVYWEEFQKDPVGLMSRVAQPAPKNIDQRKLIPVKDGNERLTSSGFACSQCCQPLYVYKLEQVNDKGKPHTNYFGRCNVSEHERLILLSPHKPEANDELVTYSLGKFGQRALDFYSIHVTRESNHPVKPLEQIGGNSCASGPVGKALSDACMGAVASFLTKYQDIILEHQKVIKKNEKRLANLKDIASANGLAFPKITLPPQPHTKEGIEAYNNVVAQIVIWVNLNLWQKLKIGRDEAKPLQRLKGFPSFPLVERQANEVDWWDMVCNVKKLINEKKEDGKVFWQNLAGYKRQEALRPYLSSEEDRKKGKKFARYQLGDLLLHLEKKHGEDWGKVYDEAWERIDKKVEGLSKHIKLEEERRSEDAQSKAALTDWLRAKASFVIEGLKEADKDEFCRCELKLQKWYGDLRGKPFAIEAENSILDISGFSKQYNCAFIWQKDGVKKLNLYLIINYFKGGKLRFKKIKPEAFEANRFYTVINKKSGEIVPMEVNFNFDDPNLIILPLAFGKRQGREFIWNDLLSLETGSLKLANGRVIEKTLYNRRTRQDEPALFVALTFERREVLDSSNIKPMNLIGVDRGENIPAVIALTDPEGCPLSRFKDSLGNPTHILRIGESYKEKQRTIQAKKEVEQRRAGGYSRKYASKAKNLADDMVRNTARDLLYYAVTQDAMLIFENLSRGFGRQGKRTFMAERQYTRMEDWLTAKLAYEGLSKTLLSKTLAQYTSKTCSNCGFTITSADYDRVLEKLKKTATGWMTTINGKELKVEGQITYYNRRKRQNVVKDLSVELDRLSEESVNNDISSWTKGRSGEALSLLKKRFSHRPVQEKFVCLNCGFETHADEQAALNIARSWLFLRSQEYKKYQTNKTTGNTDKRAFVETWQSFYRKKLKEVWKPAV

SEQ ID NO: 97 - protein, 977 aa, synthetic construct
MQEIKRINKIRRRLVKDSNTKKAGKTGPMKTLLVRVMTPDLRERLENLRKKPENIPQPISNTSRANLNKLLTDYTEMKKAILHVYWEEFQKDPVGLMSRVAQPAPKNIDQRKLIPVKDGNERLTSSGFACSQCCQPLYVYKLEQVNDKGKPHTNYFGRCNVSEHERLILLSPHKPEANDELVTYSLGKFGQRALDFYSIHVTRESNHPVKPLEQIGGNSCASGPVGKALSDACMGAVASFLTKYQDIILEHQKVIKKNEKRLANLKDIASANGLAFPKITLPPQPHTKEGIEAYNNVVAQIVIWVNLNLWQKLKIGRDEAKPLQRLKGFPSFPLVERQANEVDWWDMVCNVKKLINEKKEDGKVFWQNLAGYKRQEALRPYLSSENDRKKGKKFARYQLGDLLLHLEKKHGEDWGKVYDEAWERIDKKVEGLSKHIKLEEERRSEDAQSKAALTDWLRAKASFVIEGLKEADKDEFCRCELKLQKWYGDLRGKPFAIEAENSILDISGFSKQYNCAFIWQKDGVKKLNLYLIINYFKGGKLRFKKIKPEAFEANRFYTVINKKSGEIVPMEVNFNFDDPNLIILPLAFGKRQGREFIWNDLLSLETGSLKLANGRVIEKTLYNRRTRQDEPALFVALTFERREVLDSSNIKPMNLIGVDRGENIPAVIALTDPEGCPLSRFKDSLGNPTHILRIGESYKEKQRTIQAKKEVEQRRAGGYSRKYASKAKNLADDMVRNTARDLLYYAVTQDAMLIFENLSRGFGRQGKRTFMAERQYTRMEDWLTAKLAYEGLSKTLLSKTLAQYTSKTCSNCGFTITSADYDRVLEKLKKTATGWMTTINGKELKVEGQITYYNRRKRQNVVKDLSVELDRLSEESVNNDISSWTKGRSGEALSLLKKRFSHRPVQEKFVCLNCGFETHADEQAALNIARSWLFLRSQEYKKYQTNKTTGNTDKRAFVETWQSFYRKKLKEVWKPAV

SEQ ID NO: 98 - protein, 977 aa, synthetic construct
MQEIKRINKIRRRLVKDSNTKKAGKTGPMKTLLVRVMTPDLRERLENLRKKPENIPQPISNTSRANLNKLLTDYTEMKKAILHVYWEEFQKDPVGLMSRVAQPAPKNIDQRKLIPVKDGNERLTSSGFACSQCCQPLYVYKLEQVNDKGKPHTNYFGRCNVSEHERLILLSPHKPEANDELVTYSLGKFGQRALDFYSIHVTRESNHPVKPLEQIGGNSCASGPVGKALSDACMGAVASFLTKYQDIILEHQKVIKKNEKRLANLKDIASANGLAFPKITLPPQPHTKEGIEAYNNVVAQIVIWVNLNLWQKLKIGRDEAKPLQRLKGFPSFPLVERQANEVDWWDMVCNVKKLINEKKEDGKVFWQNLAGYKRQEALRPYLSSENDRKKGKKFARYQLGDLLKHLEKKHGEDWGKVYDEAWERIDKKVEGLSKHIKLEEERRSEDAQSKAALTDWLRAKASFVIEGLKEADKDEFSRCELKLQKWYGDLRGKPFAIEAENSILDISGFSKQYNCAFIWQKDGVKKLNLYLIINYFKGGKLRFKKIKPEAFEANRFYTVINKKSGEIVPMEVNFNFDDPNLIILPLAFGKRQGREFIWNDLLSLETGSLKLANGRVIEKTLYNRRTRQDEPALFVALTFERREVLDSSNIKPMNLIGVDRGENIPAVIALTDPEGCPLSRFKDSLGNPTHILRIGESYKEKQRTIQAKKEVEQRRAGGYSRKYASKAKNLADDMVRNTARDLLYYAVTQDAMLIFENLSRGFGRQGKRTFMAERQYTRMEDWLTAKLAYEGLSKTLLSKTLAQYTSKTCSNCGFTITSADYDRVLEKLKKTATGWMTTINGKELKVEGQITYYNRRKRQNVVKDLSVELDRLSEESVNNDISSWTKGRSGEALSLLKKRFSHRPVQEKFVCLNCGFETHADEQAALNIARSWLFLRSQEYKKYQTNKTTGNTDKRAFVETWQSFYRKKLKEVWKPAV

SEQ ID NO: 99 - protein, 977 aa, synthetic construct
MQEIKRINKIRRRLVKDSNTKKAGKTGPMKTLLVRVMTPDLRERLENLRKKPENIPQPISNTSRANLNKLLTDYTEMKKAILHVYWEEFQKDPVGLMSRVAQPAPKNIDQRKLIPVKDGNERLTSSGFACSQCCQPLYVYKLEQVNDKGKPHTNYFGRCNVSEHERLILLSPHKPEANDELVTYSLGKFGQRALDFYSIHVTRESNHPVKPLEQIGGNSCASGPVGKALSDACMGAVASFLTKYQDIILEHQKVIKKNEKRLANLKDIASANGLAFPKITLPPQPHTKEGIEAYNNVVAQIVIWVNLNLWQKLKIGRDEAKPLQRLKGFPSFPLVERQANEVDWWDMVCNVKKLINEKKEDGKVFWQNLAGYKRQEALRPYLSSEEDRKKGKKFARYQFGDLLLHLEKKHGEDWGKVYDEAWERIDKKVEGLSKHIKLEEERRSEDAQSKAALTDWLRAKASFVIEGLKEADKDEFCRCELKLQKWYGDLRGKPFAIEAENSILDISGFSKQYNCAFIWQKDGVKKLNLYLIINYFKGGKLRFKKIKPEAFEANRFYTVINKKSGEIVPMEVNFNFDDPNLIILPLAFGKRQGREFIWNDLLSLETGSLKLANGRVIEKTLYNRRTRQDEPALFVALTFERREVLDSSNIKPMNLIGVDRGENIPAVIALTDPEGCPLSRFKDSLGNPTHILRIGESYKEKQRTIQAKKEVEQRRAGGYSRKYASKAKNLADDMVRNTARDLLYYAVTQDAMLIFENLSRGFGRQGKRTFMAERQYTRMEDWLTAKLAYEGLSKTLLSKTLAQYTSKTCSNCGFTITSADYDRVLEKLKKTATGWMTTINGKELKVEGQITYYNRRKRQNVVKDLSVELDRLSEESVNNDISSWTKGRSGEALSLLKKRFSHRPVQEKFVCLNCGFETHADEQAALNIARSWLFLRSQEYKKYQTNKTTGNTDKRAFVETWQSFYRKKLKEVWKPAV

SEQ ID NO: 100 - protein, 977 aa, synthetic construct
MQEIKRINKIRRRLVKDSNTKKAGKTGPMKTLLVRVMTPDLRERLENLRKKPENIPQPISNTSRANLNKLLTDYTEMKKAILHVYWEEFQKDPVGLMSRVAQPAPKNIDQRKLIPVKDGNERLTSSGFACSQCCQPLYVYKLEQVNDKGKPHTNYFGRCNVSEHERLILLSPHKPEANDELVTYSLGKFGQRALDFYSIHVTRESNHPVKPLEQIGGNSCASGPVGKALSDACMGAVASFLTKYQDIILEHQKVIKKNEKRLANLKDIASANGLAFPKITLPPQPHTKEGIEAYNNVVAQIVIWVNLNLWQKLKIGRDEAKPLQRLKGFPSFPLVERQANEVDWWDMVCNVKKLINEKKEDGKVFWQNLAGYKRQEALRPYLSSEEDRKKGKKFARYQFGDLLKHLEKKHGEDWGKVYDEAWERIDKKVEGLSKHIKLEEERRSEDAQSKAALTDWLRAKASFVIEGLKEADKDEFCRCELKLQKWYGDLRGKPFAIEAENSILDISGFSKQYNCAFIWQKDGVKKLNLYLIINYFKGGKLRFKKIKPEAFEANRFYTVINKKSGEIVPMEVNFNFDDPNLIILPLAFGKRQGREFIWNDLLSLETGSLKLANGRVIEKTLYNRRTRQDEPALFVALTFERREVLDSSNIKPMNLIGVDRGENIPAVIALTDPEGCPLSRFKDSLGNPTHILRIGESYKEKQRTIQAKKEVEQRRAGGYSRKYASKAKNLADDMVRNTARDLLYYAVTQDAMLIFENLSRGFGRQGKRTFMAERQYTRMEDWLTAKLAYEGLSKTLLSKTLAQYTSKTCSNCGFTITSADYDRVLEKLKKTATGWMTTINGKELKVEGQITYYNRRKRQNVVKDLSVELDRLSEESVNNDISSWTKGRSGEALSLLKKRFSHRPVQEKFVCLNCGFETHADEQAALNIARSWLFLRSQEYKKYQTNKTTGNTDKRAFVETWQSFYRKKLKEVWKPAV

SEQ ID NO: 101 - protein, 977 aa, synthetic construct
MQEIKRINKIRRRLVKDSNTKKAGKTGPMKTLLVRVMTPDLRERLENLRKKPENIPQPISNTSRANLNKLLTDYTEMKKAILHVYWEEFQKDPVGLMSRVAQPAPKNIDQRKLIPVKDGNERLTSSGFACSQCCQPLYVYKLEQVNDKGKPHTNYFGRCNVSEHERLILLSPHKPEANDELVTYSLGKFGQRALDFYSIHVTRESNHPVKPLEQIGGNSCASGPVGKALSDACMGAVASFLTKYQDIILEHQKVIKKNEKRLANLKDIASANGLAFPKITLPPQPHTKEGIEAYNNVVAQIVIWVNLNLWQKLKIGRDEAKPLQRLKGFPSFPLVERQANEVDWWDMVCNVKKLINEKKEDGKVFWQNLAGYKRQEALRPYLSSENDRKKGKKFARYQFGDLLLHLEKKHGEDWGKVYDEAWERIDKKVEGLSKHIKLEEERRSEDAQSKAALTDWLRAKASFVIEGLKEADKDEFCRCELKLQKWYGDLRGKPFAIEAENSILDISGFSKQYNCAFIWQKDGVKKLNLYLIINYFKGGKLRFKKIKPEAFEANRFYTVINKKSGEIVPMEVNFNFDDPNLIILPLAFGKRQGREFIWNDLLSLETGSLKLANGRVIEKTLYNRRTRQDEPALFVALTFERREVLDSSNIKPMNLIGVDRGENIPAVIALTDPEGCPLSRFKDSLGNPTHILRIGESYKEKQRTIQAKKEVEQRRAGGYSRKYASKAKNLADDMVRNTARDLLYYAVTQDAMLIFENLSRGFGRQGKRTFMAERQYTRMEDWLTAKLAYEGLSKTLLSKTLAQYTSKTCSNCGFTITSADYDRVLEKLKKTATGWMTTINGKELKVEGQITYYNRRKRQNVVKDLSVELDRLSEESVNNDISSWTKGRSGEALSLLKKRFSHRPVQEKFVCLNCGFETHADEQAALNIARSWLFLRSQEYKKYQTNKTTGNTDKRAFVETWQSFYRKKLKEVWKPAV

SEQ ID NO: 102 - protein, 977 aa, synthetic construct
MQEIKRINKIRRRLVKDSNTKKAGKTGPMKTLLVRVMTPDLRERLENLRKKPENIPQPISNTSRANLNKLLTDYTEMKKAILHVYWEEFQKDPVGLMSRVAQPAPKNIDQRKLIPVKDGNERLTSSGFACSQCCQPLYVYKLEQVNDKGKPHTNYFGRCNVSEHERLILLSPHKPEANDELVTYSLGKFGQRALDFYSIHVTRESNHPVKPLEQIGGNSCASGPVGKALSDACMGAVASFLTKYQDIILEHQKVIKKNEKRLANLKDIASANGLAFPKITLPPQPHTKEGIEAYNNVVAQIVIWVNLNLWQKLKIGRDEAKPLQRLKGFPSFPLVERQANEVDWWDMVCNVKKLINEKKEDGKVFWQNLAGYKRQEALRPYLSSENDRKKGKKFARYQFGDLLKHLEKKHGEDWGKVYDEAWERIDKKVEGLSKHIKLEEERRSEDAQSKAALTDWLRAKASFVIEGLKEADKDEFSRCELKLQKWYGDLRGKPFAIEAENSILDISGFSKQYNCAFIWQKDGVKKLNLYLIINYFKGGKLRFKKIKPEAFEANRFYTVINKKSGEIVPMEVNFNFDDPNLIILPLAFGKRQGREFIWNDLLSLETGSLKLANGRVIEKTLYNRRTRQDEPALFVALTFERREVLDSSNIKPMNLIGVDRGENIPAVIALTDPEGCPLSRFKDSLGNPTHILRIGESYKEKQRTIQAKKEVEQRRAGGYSRKYASKAKNLADDMVRNTARDLLYYAVTQDAMLIFENLSRGFGRQGKRTFMAERQYTRMEDWLTAKLAYEGLSKTLLSKTLAQYTSKTCSNCGFTITSADYDRVLEKLKKTATGWMTTINGKELKVEGQITYYNRRKRQNVVKDLSVELDRLSEESVNNDISSWTKGRSGEALSLLKKRFSHRPVQEKFVCLNCGFETHADEQAALNIARSWLFLRSQEYKKYQTNKTTGNTDKRAFVETWQSFYRKKLKEVWKPAV

SEQ ID NO: 103 - protein, 977 aa, synthetic construct
MQEIKRINKIRRRLVKDSNTKKAGKTGPMKTLLVRVMTPDLRERLENLRKKPENIPQPISNTSRANLNKLLTDYTEMKKAILHVYWEEFQKDPVGLMSRVAQPAPKNIDQRKLIPVKDGNERLTSSGFACSQCCQPLYVYKLEQVNDKGKPHTNYFGRCNVSEHERLILLSPHKPEANDELVTYSLGKFGQRALDFYSIHVTRESNHPVKPLEQIGGNSCASGPVGKALSDACMGAVASFLTKYQDIILEHQKVIKKNEKRLANLKDIASANGLAFPKITLPPQPHTKEGIEAYNNVVAQIVIWVNLNLWQKLKIGRDEAKPLQRLKGFPSFPLVERQANEVDWWDMVCNVKKLINEKKEDGKVFWQNLAGYKRQEALRPYLSSENDRKKGKKFARYQFGDLLLHLEKKHGEDWGKVYDEAWERIDKKVEGLSKHIKLEEERRSEDAQSKAALTDWLRAKASFVIEGLKEADKDEFCRCELKLQKWYGDLRGKPFAIEAENSILDISGFSKQYNCAFIWQKDGVKKLNLYLIINYFKGGKLRFKKIKPEAFEANRFYTVINKKSGEIVPMEVNFNFDDPNLIILPLAFGKRQGREFIWNDLLSLETGSLKLANGRVIEKTLYNRRTRQDEPALFVALTFERREVLDSSNIKPMNLIGIDRGENIPAVIALTDPEGCPLSRFKDSLGNPTHILRIGESYKEKQRTIQAKKEVEQRRAGGYSRKYASKAKNLADDMVRNTARDLLYYAVTQDAMLIFENLSRGFGRQGKRTFMAERQYTRMEDWLTAKLAYEGLSKTYLSKTLAQYTSKTCSNCGFTITSADYDRVLEKLKKTATGWMTTINGKELKVEGQITYYNRRKRQNVVKDLSVELDRLSEESVNNDISSWTKGRSGEALSLLKKRFSHRPVQEKFVCLNCGFETHADEQAALNIARSWLFLRSQEYKKYQTNKTTGNTDKRAFVETWQSFYRKKLKEVWKPAV

SEQ ID NO: 104 - protein, 977 aa, synthetic construct
MQEIKRINKIRRRLVKDSNTKKAGKTGPMKTLLVRVMTPDLRERLENLRKKPENIPQPISNTSRANLNKLLTDYTEMKKAILHVYWEEFQKDPVGLMSRVAQPAPKNIDQRKLIPVKDGNERLTSSGFACSQCCQPLYVYKLEQVNDKGKPHTNYFGRCNVSEHERLILLSPHKPEANDELVTYSLGKFGQRALDFYSIHVTRESNHPVKPLEQIGGNSCASGPVGKALSDACMGAVASFLTKYQDIILEHQKVIKKNEKRLANLKDIASANGLAFPKITLPPQPHTKEGIEAYNNVVAQIVIWVNLNLWQKLKIGRDEAKPLQRLKGFPSFPLVERQANEVDWWDMVCNVKKLINEKKEDGKVFWQNLAGYKRQEALRPYLSSENDRKKGKKFARYQFGDLLKHLEKKHGEDWGKVYDEAWERIDKKVEGLSKHIKLEEERRSEDAQSKAALTDWLRAKASFVIEGLKEADKDEFCRCELKLQKWYGDLRGKPFAIEAENSILDISGFSKQYNCAFIWQKDGVKKLNLYLIINYFKGGKLRFKKIKPEAFEANRFYTVINKKSGEIVPMEVNFNFDDPNLIILPLAFGKRQGREFIWNDLLSLETGSLKLANGRVIEKTLYNRRTRQDEPALFVALTFERREVLDSSNIKPMNLIGIDRGENIPAVIALTDPEGCPLSRFKDSLGNPTHILRIGESYKEKQRTIQAKKEVEQRRAGGYSRKYASKAKNLADDMVRNTARDLLYYAVTQDAMLIFENLSRGFGRQGKRTFMAERQYTRMEDWLTAKLAYEGLSKTYLSKTLAQYTSKTCSNCGFTITSADYDRVLEKLKKTATGWMTTINGKELKVEGQITYYNRRKRQNVVKDLSVELDRLSEESVNNDISSWTKGRSGEALSLLKKRFSHRPVQEKFVCLNCGFETHADEQAALNIARSWLFLRSQEYKKYQTNKTTGNTDKRAFVETWQSFYRKKLKEVWKPAV

SEQ ID NO: 105 - protein, 977 aa, synthetic construct
MQEIKRINKIRRRLVKDSNTKKAGKTGPMKTLLVRVMTPDLRERLENLRKKPENIPQPISNTSRANLNKLLTDYTEMKKAILHVYWEEFQKDPVGLMSRVAQPAPKNIDQRKLIPVKDGNERLTSSGFACSQCCQPLYVYKLEQVNDKGKPHTNYFGRCNVSEHERLILLSPHKPEANDELVTYSLGKFGQRALDFYSIHVTRESNHPVKPLEQIGGNSCASGPVGKALSDACMGAVASFLTKYQDIILEHQKVIKKNEKRLANLKDIASANGLAFPKITLPPQPHTKEGIEAYNNVVAQIVIWVNLNLWQKLKIGRDEAKPLQRLKGFPSFPLVERQANEVDWWDMVCNVKKLINEKKEDGKVFWQNLAGYKRQEALRPYLSSPEDRKKGKKFARYQFGDLLLHLEKKHGEDWGKVYDEAWERIDKKVEGLSKHIKLEEERRSEDAQSKAALTDWLRAKASFVIEGLKEADKDEFCRCELKLQKWYGDLRGKPFAIEAENSILDISGFSKQYNCAFIWQKDGVKKLNLYLIINYFKGGKLRFKKIKPEAFEANRFYTVINKKSGEIVPMEVNFNFDDPNLIILPLAFGKRQGREFIWNDLLSLETGSLKLANGRVIEKTLYNRRTRQDEPALFVALTFERREVLDSSNIKPMNLIGIDRGENIPAVIALTDPEGCPLSRFKDSLGNPTHILRIGESYKEKQRTIQAKKEVEQRRAGGYSRKYASKAKNLANDMVRNTARDLLYYAVTQDAMLIFENLSRGFGRQGKRTFMAERQYTRMEDWLTAKLAYEGLSKTYLSKTLAQYTSKTCSNCGFTITSADYDRVLEKLKKTATGWMTTINGKELKVEGQITYYNRRKRQNVVKDLSVELDRLSEESVNNDISSWTKGRSGEALSLLKKRFSHRPVQEKFVCLNCGFETHADEQAALNIARSWLFLRSQEYKKYQTNKTTGNTDKRAFVETWQSFYRKKLKEVWKPAV

SEQ ID NO: 106 - protein, 977 aa, synthetic construct
MQEIKRINKIRRRLVKDSNTKKAGKTGPMKTLLVRVMTPDLRERLENLRKKPENIPQPISNTSRANLNKLLTDYTEMKKAILHVYWEEFQKDPVGLMSRVAQPAPKNIDQRKLIPVKDGNERLTSSGFACSQCCQPLYVYKLEQVNDKGKPHTNYFGRCNVSEHERLILLSPHKPEANDELVTYSLGKFGQRALDFYSIHVTRESNHPVKPLEQIGGNSCASGPVGKALSDACMGAVASFLTKYQDIILEHQKVIKKNEKRLANLKDIASANGLAFPKITLPPQPHTKEGIEAYNNVVAQIVIWVNLNLWQKLKIGRDEAKPLQRLKGFPSFPLVERQANEVDWWDMVCNVKKLINEKKEDGKVFWQNLAGYKRQEALRPYLSSPEDRKKGKKFARYQFGDLLLHLEKKHGEDWGKVYDEAWERIDKKVEGLSKHIKLEEERRSEDAQSKAALTDWLRAKASFVIEGLKEADKDEFCRCELKLQKWYGDLRGKPFAIEAENSILDISGFSKQYNCAFIWQKDGVKKLNLYLIINYFKGGKLRFKKIKPEAFEANRFYTVINKKSGEIVPMEVNFNFDDPNLIILPLAFGKRQGREFIWNDLLSLETGSLKLANGRVIEKTLYNRRTRQDEPALFVALTFERREVLDSSNIKPMNLIGVDRGENIPAVIALTDPEGCPLSRFKDSLGNPTHILRIGESYKEKQRTIQAKKEVEQRRAGGYSRKYASKAKNLANDMVRNTARDLLYYAVTQDAMLIFENLSRGFGRQGKRTFMAERQYTRMEDWLTAKLAYEGLSKTYLSKTLAQYTSKTCSNCGFTITSADYDRVLEKLKKTATGWMTTINGKELKVEGQITYYNRRKRQNVVKDLSVELDRLSEESVNNDISSWTKGRSGEALSLLKKRFSHRPVQEKFVCLNCGFETHADEQAALNIARSWLFLRSQEYKKYQTNKTTGNTDKRAFVETWQSFYRKKLKEVWKPAV

SEQ ID NO: 107 - protein, 977 aa, synthetic construct
MQEIKRINKIRRRLVKDSNTKKAGKTGPMKTLLVRVMTPDLRERLENLRKKPENIPQPISNTSRANLNKLLTDYTEMKKAILHVYWEEFQKDPVGLMSRVAQPAPKNIDQRKLIPVKDGNERLTSSGFACSQCCQPLYVYKLEQVNDKGKPHTNYFGRCNVSEHERLILLSPHKPEANDELVTYSLGKFGQRALDFYSIHVTRESNHPVKPLEQIGGNSCASGPVGKALSDACMGAVASFLTKYQDIILEHQKVIKKNEKRLANLKDIASANGLAFPKITLPPQPHTKEGIEAYNNVVAQIVIWVNLNLWQKLKIGRDEAKPLQRLKGFPSFPLVERQANEVDWWDMVCNVKKLINEKKEDGKVFWQNLAGYKRQEALRPYLSSPEDRKKGKKFARYQLGDLLLHLEKKHGEDWGKVYDEAWERIDKKVEGLSKHIKLEEERRSEDAQSKAALTDWLRAKASFVIEGLKEADKDEFCRCELKLQKWYGDLRGKPFAIEAENSILDISGFSKQYNCAFIWQKDGVKKLNLYLIINYFKGGKLRFKKIKPEAFEANRFYTVINKKSGEIVPMEVNFNFDDPNLIILPLAFGKRQGREFIWNDLLSLETGSLKLANGRVIEKTLYNRRTRQDEPALFVALTFERREVLDSSNIKPMNLIGVDRGENIPAVIALTDPEGCPLSRFKDSLGNPTHILRIGESYKEKQRTIQAKKEVEQRRAGGYSRKYASKAKNLANDMVRNTARDLLYYAVTQDAMLIFENLSRGFGRQGKRTFMAERQYTRMEDWLTAKLAYEGLSKTYLSKTLAQYTSKTCSNCGFTITSADYDRVLEKLKKTATGWMTTINGKELKVEGQITYYNRRKRQNVVKDLSVELDRLSEESVNNDISSWTKGRSGEALSLLKKRFSHRPVQEKFVCLNCGFETHADEQAALNIARSWLFLRSQEYKKYQTNKTTGNTDKRAFVETWQSFYRKKLKEVWKPAV

SEQ ID NO: 108 - protein, 977 aa, synthetic construct
MQEIKRINKIRRRLVKDSNTKKAGKTGPMKTLLVRVMTPDLRERLENLRKKPENIPQPISNTSRANLNKLLTDYTEMKKAILHVYWEEFQKDPVGLMSRVAQPAPKNIDQRKLIPVKDGNERLTSSGFACSQCCQPLYVYKLEQVNDKGKPHTNYFGRCNVSEHERLILLSPHKPEANDELVTYSLGKFGQRALDFYSIHVTRESNHPVKPLEQIGGNSCASGPVGKALSDACMGAVASFLTKYQDIILEHQKVIKKNEKRLANLKDIASANGLAFPKITLPPQPHTKEGIEAYNNVVAQIVIWVNLNLWQKLKIGRDEAKPLQRLKGFPSFPLVERQANEVDWWDMVCNVKKLINEKKEDGKVFWQNLAGYKRQEALRPYLSSPNDRKKGKKFARYQFGDLLLHLEKKHGEDWGKVYDEAWERIDKKVEGLSKHIKLEEERRSEDAQSKAALTDWLRAKASFVIEGLKEADKDEFCRCELKLQKWYGDLRGKPFAIEAENSILDISGFSKQYNCAFIWQKDGVKKLNLYLIINYFKGGKLRFKKIKPEAFEANRFYTVINKKSGEIVPMEVNFNFDDPNLIILPLAFGKRQGREFIWNDLLSLETGSLKLANGRVIEKTLYNRRTRQDEPALFVALTFERREVLDSSNIKPMNLIGVDRGENIPAVIALTDPEGCPLSRFKDSLGNPTHILRIGESYKEKQRTIQAKKEVEQRRAGGYSRKYASKAKNLANDMVRNTARDLLYYAVTQDAMLIFENLSRGFGRQGKRTFMAERQYTRMEDWLTAKLAYEGLSKTYLSKTLAQYTSKTCSNCGFTITSADYDRVLEKLKKTATGWMTTINGKELKVEGQITYYNRRKRQNVVKDLSVELDRLSEESVNNDISSWTKGRSGEALSLLKKRFSHRPVQEKFVCLNCGFETHADEQAALNIARSWLFLRSQEYKKYQTNKTTGNTDKRAFVETWQSFYRKKLKEVWKPAV

SEQ ID NO: 109 - protein, 977 aa, synthetic construct
MQEIKRINKIRRRLVKDSNTKKAGKTGPMKTLLVRVMTPDLRERLENLRKKPENIPQPISNTSRANLNKLLTDYTEMKKAILHVYWEEFQKDPVGLMSRVAQPAPKNIDQRKLIPVKDGNERLTSSGFACSQCCQPLYVYKLEQVNDKGKPHTNYFGRCNVSEHERLILLSPHKPEANDELVTYSLGKFGQRALDFYSIHVTRESNHPVKPLEQIGGNSCASGPVGKALSDACMGAVASFLTKYQDIILEHQKVIKKNEKRLANLKDIASANGLAFPKITLPPQPHTKEGIEAYNNVVAQIVIWVNLNLWQKLKIGRDEAKPLQRLKGFPSFPLVERQANEVDWWDMVCNVKKLINEKKEDGKVFWQNLAGYKRQEALRPYLSSPEDRKKGKKFARYQFGDLLKHLEKKHGEDWGKVYDEAWERIDKKVEGLSKHIKLEEERRSEDAQSKAALTDWLRAKASFVIEGLKEADKDEFCRCELKLQKWYGDLRGKPFAIEAENSILDISGFSKQYNCAFIWQKDGVKKLNLYLIINYFKGGKLRFKKIKPEAFEANRFYTVINKKSGEIVPMEVNFNFDDPNLIILPLAFGKRQGREFIWNDLLSLETGSLKLANGRVIEKTLYNRRTRQDEPALFVALTFERREVLDSSNIKPMNLIGVDRGENIPAVIALTDPEGCPLSRFKDSLGNPTHILRIGESYKEKQRTIQAKKEVEQRRAGGYSRKYASKAKNLANDMVRNTARDLLYYAVTQDAMLIFENLSRGFGRQGKRTFMAERQYTRMEDWLTAKLAYEGLSKTYLSKTLAQYTSKTCSNCGFTITSADYDRVLEKLKKTATGWMTTINGKELKVEGQITYYNRRKRQNVVKDLSVELDRLSEESVNNDISSWTKGRSGEALSLLKKRFSHRPVQEKFVCLNCGFETHADEQAALNIARSWLFLRSQEYKKYQTNKTTGNTDKRAFVETWQSFYRKKLKEVWKPAV

SEQ ID NO: 110 - protein, 977 aa, synthetic construct
MQEIKRINKIRRRLVKDSNTKKAGKTGPMKTLLVRVMTPDLRERLENLRKKPENIPQPISNTSRANLNKLLTDYTEMKKAILHVYWEEFQKDPVGLMSRVAQPAPKNIDQRKLIPVKDGNERLTSSGFACSQCCQPLYVYKLEQVNDKGKPHTNYFGRCNVSEHERLILLSPHKPEANDELVTYSLGKFGQRALDFYSIHVTRESNHPVKPLEQIGGNSCASGPVGKALSDACMGAVASFLTKYQDIILEHKKVIKKNEKRLANLKDIASANGLAFPKITLPPQPHTKEGIEAYNNVVAQIVIWVNLNLWQKLKIGRDEAKPLQRLKGFPSFPLVERQANEVDWWDMVCNVKKLINEKKEDGKVFWQNLAGYKRQEALRPYLSSPEDRKKGKKFARYQFGDLLLHLEKKHGEDWGKVYDEAWERIDKKVEGLSKHIKLEEERRSEDAQSKAALTDWLRAKASFVIEGLKEADKDEFCRCELKLQKWYGDLRGKPFAIEAENSILDISGFSKQYNCAFIWQKDGVKKLNLYLIINYFKGGKLRFKKIKPEAFEANRFYTVINKKSGEIVPMEVNFNFDDPNLIILPLAFGKRQGREFIWNDLLSLETGSLKLANGRVIEKPLYNRRTRQDEPALFVALTFERREVLDSSNIKPMNLIGIDRGENIPAVIALTDPEGCPLSRFKDSLGNPTHILRIGESYKEKQRTIQAKKEVEQRRAGGYSRKYASKAKNLADDMVRNTARDLLYYAVTQDAMLIFENLSRGFGRQGKRTFMAERQYTRMEDWLTAKLAYEGLSKTYLSKTLAQYTSKTCSNCGFTITSADYDRVLEKLKKTATGWMTTINGKELKVEGQITYYNRRKRQNVVKDLSVELDRLSEESVNNDISSWTKGRSGEALSLLKKRFSHRPVQEKFVCLNCGFETHADEQAALNIARSWLFLRSQEYKKYQTNKTTGNTDKRAFVETWQSFYRKKLKEVWKPAV

SEQ ID NO: 111 - protein, 977 aa, synthetic construct
MQEIKRINKIRRRLVKDSNTKKAGKTGPMKTLLVRVMTPDLRERLENLRKKPENIPQPISNTSRANLNKLLTDYTEMKKAILHVYWEEFQKDPVGLMSRVAQPAPKNIDQRKLIPVKDGNERLTSSGFACSQCCQPLYVYKLEQVNDKGKPHTNYFGRCNVSEHERLILLSPHKPEANDELVTYSLGKFGQRALDFYSIHVTRESNHPVKPLEQIGGNSCASGPVGKALSDACMGAVASFLTKYQDIILEHKKVIKKNEKRLANLKDIASANGLAFPKITLPPQPHTKEGIEAYNNVVAQIVIWVNLNLWQKLKIGRDEAKPLQRLKGFPSFPLVERQANEVDWWDMVCNVKKLINEKKEDGKVFWQNLAGYKRQEALRPYLSSPEDRKKGKKFARYQFGDLLLHLEKKHGEDWGKVYDEAWERIDKKVEGLSKHIKLEEERRSEDAQSKAALTDWLRAKASFVIEGLKEADKDEFCRCELKLQKWYGDLRGKPFAIEAENSILDISGFSKQYNCAFIWQKDGVKKLNLYLIINYFKGGKLRFKKIKPEAFEANRFYTVINKKSGEIVPMEVNFNFDDPNLIILPLAFGKRQGREFIWNDLLSLETGSLKLANGRVIEKPLYNRRTRQDEPALFVALTFERREVLDSSNIKPMNLIGVDRGENIPAVIALTDPEGCPLSRFKDSLGNPTHILRIGESYKEKQRTIQAKKEVEQRRAGGYSRKYASKAKNLADDMVRNTARDLLYYAVTQDAMLIFENLSRGFGRQGKRTFMAERQYTRMEDWLTAKLAYEGLSKTYLSKTLAQYTSKTCSNCGFTITSADYDRVLEKLKKTATGWMTTINGKELKVEGQITYYNRRKRQNVVKDLSVELDRLSEESVNNDISSWTKGRSGEALSLLKKRFSHRPVQEKFVCLNCGFETHADEQAALNIARSWLFLRSQEYKKYQTNKTTGNTDKRAFVETWQSFYRKKLKEVWKPAV

SEQ ID NO: 112 - protein, 977 aa, synthetic construct
MQEIKRINKIRRRLVKDSNTKKAGKTGPMKTLLVRVMTPDLRERLENLRKKPENIPQPISNTSRANLNKLLTDYTEMKKAILHVYWEEFQKDPVGLMSRVAQPAPKNIDQRKLIPVKDGNERLTSSGFACSQCCQPLYVYKLEQVNDKGKPHTNYFGRCNVSEHERLILLSPHKPEANDELVTYSLGKFGQRALDFYSIHVTRESNHPVKPLEQIGGNSCASGPVGKALSDACMGAVASFLTKYQDIILEHKKVIKKNEKRLANLKDIASANGLAFPKITLPPQPHTKEGIEAYNNVVAQIVIWVNLNLWQKLKIGRDEAKPLQRLKGFPSFPLVERQANEVDWWDMVCNVKKLINEKKEDGKVFWQNLAGYKRQEALRPYLSSPNDRKKGKKFARYQFGDLLLHLEKKHGEDWGKVYDEAWERIDKKVEGLSKHIKLEEERRSEDAQSKAALTDWLRAKASFVIEGLKEADKDEFCRCELKLQKWYGDLRGKPFAIEAENSILDISGFSKQYNCAFIWQKDGVKKLNLYLIINYFKGGKLRFKKIKPEAFEANRFYTVINKKSGEIVPMEVNFNFDDPNLIILPLAFGKRQGREFIWNDLLSLETGSLKLANGRVIEKPLYNRRTRQDEPALFVALTFERREVLDSSNIKPMNLIGVDRGENIPAVIALTDPEGCPLSRFKDSLGNPTHILRIGESYKEKQRTIQAKKEVEQRRAGGYSRKYASKAKNLADDMVRNTARDLLYYAVTQDAMLIFENLSRGFGRQGKRTFMAERQYTRMEDWLTAKLAYEGLSKTYLSKTLAQYTSKTCSNCGFTITSADYDRVLEKLKKTATGWMTTINGKELKVEGQITYYNRRKRQNVVKDLSVELDRLSEESVNNDISSWTKGRSGEALSLLKKRFSHRPVQEKFVCLNCGFETHADEQAALNIARSWLFLRSQEYKKYQTNKTTGNTDKRAFVETWQSFYRKKLKEVWKPAV

SEQ ID NO: 113 - protein, 977 aa, synthetic construct
MQEIKRINKIRRRLVKDSNTKKAGKTGPMKTLLVRVMTPDLRERLENLRKKPENIPQPISNTSRANLNKLLTDYTEMKKAILHVYWEEFQKDPVGLMSRVAQPAPKNIDQRKLIPVKDGNERLTSSGFACSQCCQPLYVYKLEQVNDKGKPHTNYFGRCNVSEHERLILLSPHKPEANDELVTYSLGKFGQRALDFYSIHVTRESNHPVKPLEQIGGNSCASGPVGKALSDACMGAVASFLTKYQDIILEHKKVIKKNEKRLANLKDIASANGLAFPKITLPPQPHTKEGIEAYNNVVAQIVIWVNLNLWQKLKIGRDEAKPLQRLKGFPSFPLVERQANEVDWWDMVCNVKKLINEKKEDGKVFWQNLAGYKRQEALRPYLSSPEDRKKGKKFARYQLGDLLLHLEKKHGEDWGKVYDEAWERIDKKVEGLSKHIKLEEERRSEDAQSKAALTDWLRAKASFVIEGLKEADKDEFCRCELKLQKWYGDLRGKPFAIEAENSILDISGFSKQYNCAFIWQKDGVKKLNLYLIINYFKGGKLRFKKIKPEAFEANRFYTVINKKSGEIVPMEVNFNFDDPNLIILPLAFGKRQGREFIWNDLLSLETGSLKLANGRVIEKPLYNRRTRQDEPALFVALTFERREVLDSSNIKPMNLIGVDRGENIPAVIALTDPEGCPLSRFKDSLGNPTHILRIGESYKEKQRTIQAKKEVEQRRAGGYSRKYASKAKNLADDMVRNTARDLLYYAVTQDAMLIFENLSRGFGRQGKRTFMAERQYTRMEDWLTAKLAYEGLSKTYLSKTLAQYTSKTCSNCGFTITSADYDRVLEKLKKTATGWMTTINGKELKVEGQITYYNRRKRQNVVKDLSVELDRLSEESVNNDISSWTKGRSGEALSLLKKRFSHRPVQEKFVCLNCGFETHADEQAALNIARSWLFLRSQEYKKYQTNKTTGNTDKRAFVETWQSFYRKKLKEVWKPAV

SEQ ID NO: 114 - protein, 977 aa, synthetic construct
MQEIKRINKIRRRLVKDSNTKKAGKTGPMKTLLVRVMTPDLRERLENLRKKPENIPQPISNTSRANLNKLLTDYTEMKKAILHVYWEEFQKDPVGLMSRVAQPAPKNIDQRKLIPVKDGNERLTSSGFACSQCCQPLYVYKLEQVNDKGKPHTNYFGRCNVSEHERLILLSPHKPEANDELVTYSLGKFGQRALDFYSIHVTRESNHPVKPLEQIGGNSCASGPVGKALSDACMGAVASFLTKYQDIILEHKKVIKKNEKRLANLKDIASANGLAFPKITLPPQPHTKEGIEAYNNVVAQIVIWVNLNLWQKLKIGRDEAKPLQRLKGFPSFPLVERQANEVDWWDMVCNVKKLINEKKEDGKVFWQNLAGYKRQEALRPYLSSPEDRKKGKKFARYQFGDLLKHLEKKHGEDWGKVYDEAWERIDKKVEGLSKHIKLEEERRSEDAQSKAALTDWLRAKASFVIEGLKEADKDEFCRCELKLQKWYGDLRGKPFAIEAENSILDISGFSKQYNCAFIWQKDGVKKLNLYLIINYFKGGKLRFKKIKPEAFEANRFYTVINKKSGEIVPMEVNFNFDDPNLIILPLAFGKRQGREFIWNDLLSLETGSLKLANGRVIEKPLYNRRTRQDEPALFVALTFERREVLDSSNIKPMNLIGVDRGENIPAVIALTDPEGCPLSRFKDSLGNPTHILRIGESYKEKQRTIQAKKEVEQRRAGGYSRKYASKAKNLADDMVRNTARDLLYYAVTQDAMLIFENLSRGFGRQGKRTFMAERQYTRMEDWLTAKLAYEGLSKTYLSKTLAQYTSKTCSNCGFTITSADYDRVLEKLKKTATGWMTTINGKELKVEGQITYYNRRKRQNVVKDLSVELDRLSEESVNNDISSWTKGRSGEALSLLKKRFSHRPVQEKFVCLNCGFETHADEQAALNIARSWLFLRSQEYKKYQTNKTTGNTDKRAFVETWQSFYRKKLKEVWKPAV

SEQ ID NO: 115 - protein, 977 aa, synthetic construct
MQEIKRINKIRRRLVKDSNTKKAGKTGPMKTLLVRVMTPDLRERLENLRKKPENIPQPISNTSRANLNKLLTDYTEMKKAILHVYWEEFQKDPVGLMSRVAQPAPKNIDQRKLIPVKDGNERLTSSGFACSQCCQPLYVYKLEQVNDKGKPHTNYFGRCNVSEHERLILLSPHKPEANDELVTYSLGKFGQRALDFYSIHVTRESNHPVKPLEQIGGNSCASGPVGKALSDACMGAVASFLTKYQDIILEHQKVIKKNEKRLANLKDIASANGLAFPKITLPPQPHTKEGIEAYNNVVAQIVIWVNLNLWQKLKIGRDEAKPLQRLKGFPSFPLVERQANEVDWWDMVCNVKKLINEKKEDGKVFWQNLAGYKRQEALRPYLSSENDRKKGKKFARYQFGDLLLHLEKKHGEDWGKVYDEAWERIDKKVEGLSKHIKLEEERRSEDAQSKAALTDWLRAKASFVIEGLKEADKDEFCRCELKLQKWYGDLRGKPFAIEAENSILDISGFSKQYNCAFIWQKDGVKKLNLYLIINYFKGGKLRFKKIKPEAFEANRFYTVINKKSGEIVPMEVNFNFDDPNLIILPLAFGKRQGREFIWNDLLSLETGSLKLANGRVIEKPLYNRRTRQDEPALFVALTFERREVLDSSNIKPMNLIGVDRGENIPAVIALTDPEGCPLSRFKDSLGNPTHILRIGESYKEKQRTIQAKKEVEQRRAGGYSRKYASKAKNLADDMVRNTARDLLYYAVTQDAMLIFENLSRGFGRQGKRTFMAERQYTRMEDWLTAKLAYEGLSKTYLSKTLAQYTSKTCSNCGFTITSADYDRVLEKLKKTATGWMTTINGKELKVEGQITYYNRRKRQNVVKDLSVELDRLSEESVNNDISSWTKGRSGEALSLLKKRFSHRPVQEKFVCLNCGFETHADEQAALNIARSWLFLRSQEYKKYQTNKTTGNTDKRAFVETWQSFYRKKLKEVWKPAV

SEQ ID NO: 116 - protein, 976 aa, synthetic construct
QEIKRINKIRRRLVKDSNTKKAGKTGPMKTLLVRVMTPDLRERLENLRKKPENIPQPISNTSRANLNKLLTDYTEMKKAILHVYWEEFQKDPVGLMSRVAQPAPKNIDQRKLIPVKDGNERLTSSGFACSQCCQPLYVYKLEQVNDKGKPHTNYFGRCNVSEHERLILLSPHKPEANDELVTYSLGKFGQRALDFYSIHVTRESNHPVKPLEQIGGNSCASGPVGKALSDACMGAVASFLTKYQDIILEHQKVIKKNEKRLANLKDIASANGLAFPKITLPPQPHTKEGIEAYNNVVAQIVIWVNLNLWQKLKIGRDEAKPLQRLKGFPSFPLVERQANEVDWWDMVCNVKKLINEKKEDGKVFWQNLAGYKRQEALRPYLSSPEDRKKGKKFARYQFGDLLLHLEKKHGEDWGKVYDEAWERIDKKVEGLSKHIKLEEERRSEDAQSKAALTDWLRAKASFVIEGLKEADKDEFCRCELKLQKWYGDLRGKPFAIEAENSILDISGFSKQYNCAFIWQKDGVKKLNLYLIINYFKGGKLRFKKIKPEAFEANRFYTVINKKSGEIVPMEVNFNFDDPNLIILPLAFGKRQGREFIWNDLLSLETGSLKLANGRVIEKPLYNRRTRQDEPALFVALTFERREVLDSSNIKPMNLIGIDRGENIPAVIALTDPEGCPLSRFKDSLGNPTHILRIGESYKEKQRTIQAKKEVEQRRAGGYSRKYASKAKNLADDMVRNTARDLLYYAVTQDAMLIFENLSRGFGRQGKRTFMAERQYTRMEDWLTAKLAYEGLSKTYLSKTLAQYTSKTCSNCGFTITSADYDRVLEKLKKTATGWMTTINGKELKVEGQITYYNRYKRQNVVKDLSVELDRLSEESVNNDISSWTKGRSGEALSLLKKRFSHRPVQEKFVCLNCGFETHADEQAALNIARSWLFLRSQEYKKYQTNKTTGNTDKRAFVETWQSFYRKKLKEVWKPAV

SEQ ID NO: 117 - protein, 976 aa, synthetic construct
QEIKRINKIRRRLVKDSNTKKAGKTGPMKTLLVRVMTPDLRERLENLRKKPENIPQPISNTSRANLNKLLTDYTEMKKAILHVYWEEFQKDPVGLMSRVAQPAPKNIDQRKLIPVKDGNERLTSSGFACSQCCQPLYVYKLEQVNDKGKPHTNYFGRCNVSEHERLILLSPHKPEANDELVTYSLGKFGQRALDFYSIHVTRESNHPVKPLEQIGGNSCASGPVGKALSDACMGAVASFLTKYQDIILEHQKVIKKNEKRLANLKDIASANGLAFPKITLPPQPHTKEGIEAYNNVVAQIVIWVNLNLWQKLKIGRDEAKPLQRLKGFPSFPLVERQANEVDWWDMVCNVKKLINEKKEDGKVFWQNLAGYKRQEALRPYLSSEEDRKKGKKFARYQFGDLLLHLEKKHGEDWGKVYDEAWERIDKKVEGLSKHIKLEEERRSEDAQSKAALTDWLRAKASFVIEGLKEADKDEFCRCELKLQKWYGDLRGKPFAIEAENSILDISGFSKQYNCAFIWQKDGVKKLNLYLIINYFKGGKLRFKKIKPEAFEANRFYTVINKKSGEIVPMEVNFNFDDPNLIILPLAFGKRQGREFIWNDLLSLETGSLKLANGRVIEKTLYNRRTRQDEPALFVALTFERREVLDSSNIKPMNLIGIDRGENIPAVIALTDPEGCPLSRFKDSLGNPTHILRIGESYKEKQRTIQAKKEVEQRRAGGYSRKYASKAKNLADDMVRNTARDLLYYAVTQDAMLIFENLSRGFGRQGKRTFMAERQYTRMEDWLTAKLAYEGLSKTYLSKTLAQYTSKTCSNCGFTITSADYDRVLEKLKKTATGWMTTINGKELKVEGQITYYNRYKRQNVVKDLSVELDRLSEESVNNDISSWTKGRSGEALSLLKKRFSHRPVQEKFVCLNCGFETHADEQAALNIARSWLFLRSQEYKKYQTNKTTGNTDKRAFVETWQSFYRKKLKEVWKPAV

SEQ ID NO: 118 - protein, 977 aa, synthetic construct; identical to SEQ ID NO: 72

SEQ ID NO: 119 - protein, 977 aa, synthetic construct; identical to SEQ ID NO: 72

SEQ ID NO: 120 - protein, 977 aa, synthetic construct; identical to SEQ ID NO: 72

SEQ ID NO: 121 - protein, 977 aa, synthetic construct; identical to SEQ ID NO: 72

SEQ ID NO: 122 - protein, 977 aa, synthetic construct; identical to SEQ ID NO: 72

SEQ ID NO: 123 - protein, 978 aa, synthetic construct
MQEIKRINKIRRRLVKDSNTKKAGKTGPMKTLLVRVMTPDLRERLENLRKKPENIPQPISNTSRANLNKLLTDYTEMKKAILHVYWEEFQKDPVGLMSRVAQPAPKNIDQRKLIPVKDGNERLTMSSGFACSQCCQPLYVYKLEQVNDKGKPHTNYFGRCNVSEHERLILLSPHKPEANDELVTYSLGKFGQRALDFYSIHVTRESNHPVKPLEQIGGNSCASGPVGKALSDACMGAVASFLTKYQDIILEHQKVIKKNEKRLANLKDIASANGLAFPKITLPPQPHTKEGIEAYNNVVAQIVIWVNLNLWQKLKIGRDEAKPLQRLKGFPSFPLVERQANEVDWWDMVCNVKKLINEKKEDGKVFWQNLAGYKRQEALRPYLSSEEDRKKGKKFARYQFGDLLLHLEKKHGEDWGKVYDEAWERIDKKVEGLSKHIKLEEERRSEDAQSKAALTDWLRAKASFVIEGLKEADKDEFCRCELKLQKWYGDLRGKPFAIEAENSILDISGFSKQYNCAFIWQKDGVKKLNLYLIINYFKGGKLRFKKIKPEAFEANRFYTVINKKSGEIVPMEVNFNFDDPNLIILPLAFGKRQGREFIWNDLLSLETGSLKLANGRVIEKTLYNRRTRQDEPALFVALTFERREVLDSSNIKPMNLIGIDRGENIPAVIALTDPEGCPLSRFKDSLGNPTHILRIGESYKEKQRTIQAKKEVEQRRAGGYSRKYASKAKNLADDMVRNTARDLLYYAVTQDAMLIFENLSRGFGRQGKRTFMAERQYTRMEDWLTAKLAYEGLSKTYLSKTLAQYTSKTCSNCGFTITSADYDRVLEKLKKTATGWMTTINGKELKVEGQITYYNRYKRQNVVKDLSVELDRLSEESVNNDISSWTKGRSGEALSLLKKRFSHRPVQEKFVCLNCGFETHADEQAALNIARSWLFLRSQEYKKYQTNKTTGNTDKRAFVETWQSFYRKKLKEVWKPAV

SEQ ID NO: 124 - protein, 977 aa, synthetic construct; identical to SEQ ID NO: 72

SEQ ID NO: 125 - protein, 977 aa, synthetic construct; identical to SEQ ID NO: 72

SEQ ID NO: 126 - protein, 977 aa, synthetic construct; identical to SEQ ID NO: 72

SEQ ID NO: 127 - protein, 977 aa, synthetic construct; identical to SEQ ID NO: 72

SEQ ID NO: 128 - protein, 977 aa, synthetic construct; identical to SEQ ID NO: 72

SEQ ID NO: 129 - protein, 977 aa, synthetic construct; identical to SEQ ID NO: 72

SEQ ID NO: 130 - protein, 977 aa, synthetic construct
QEIKRINKIRRRLVKDSNTKKAGKTGPMKTLLVRVMTPDLRERLENLRKKPENIPQPISNTSRANLNKLLTDYTEMKKAILHVYWEEFQKDPVGLMSRVAQPASKKIDQNKLKPEMDEKGNLTTAGFACSQCGQPLFVYKLEQVSEKGKAYTNYFGRCNVAEHEKLILLAQLKPEKDSDEAVTYSLGKFGQRALDFYSIHVTRESNHPVKPLEQIGGNSCASGPVGKALSDACMGAVASFLTKYQDIILEHQKVIKKNEKRLANLKDIASANGLAFPKITLPPQPHTKEGIEAYNNVVAQIVIWVNLNLWQKLKIGRDEAKPLQRLKGFPSFPLVERQANEVDWWDMVCNVKKLINEKKEDGKVFWQNLAGYKRQEALRPYLSSEEDRKKGKKFARYQFGDLLLHLEKKHGEDWGKVYDEAWERIDKKVEGLSKHIKLEEERRSEDAQSKAALTDWLRAKASFVIEGLKEADKDEFCRCELKLQKWYGDLRGKPFAIEAENSILDISGFSKQYNCAFIWQKDGVKKLNLYLIINYFKGGKLRFKKIKPEAFEANRFYTVINKKSGEIVPMEVNFNFDDPNLIILPLAFGKRQGREFIWNDLLSLETGSLKLANGRVIEKTLYNRRTRQDEPALFVALTFERREVLDSSNIKPMNLIGIDRGENIPAVIALTDPEGCPLSRFKDSLGNPTHILRIGESYKEKQRTIQAKKEVEQRRAGGYSRKYASKAKNLADDMVRNTARDLLYYAVTQDAMLIFENLSRGFGRQGKRTFMAERQYTRMEDWLTAKLAYEGLSKTYLSKTLAQYTSKTCSNCGFTITSADYDRVLEKLKKTATGWMTTINGKELKVEGQITYYNRYKRQNVVKDLSVELDRLSEESVNNDISSWTKGRSGEALSLLKKRFSHRPVQEKFVCLNCGFETHADEQAALNIARSWLFLRSQEYKKYQTNKTTGNTDKRAFVETWQSFYRKKLKEVWKPAV

SEQ ID NO: 131 - protein, 976 aa, synthetic construct
QEIKRINKIRRRLVKDSNTKKAGKTGPMKTLLVRVMTPDLRERLENLRKKPENIPQPISNTSRANLNKLLTDYTEMKKAILHVYWEEFQKDPVGLMSRVAQPAPKNIDQRKLIPVKDGNERLTSSGFACSQCCQPLYVYKLEQVNDKGKPHTNYFGRCNVSEHERLILLSPHKPEANDELVTYSLGKFGQRALDFYSIHVTKESTHPVKPLAQIAGNRYASGPVGKALSDACMGTIASFLSKYQDIIIEHQKVVKGNQKRLESLRELAGKENLEYPSVTLPPQPHTKEGVDAYNEVIARVRMWVNLNLWQKLKLSRDDAKPLLRLKGFPSFPLVERQANEVDWWDMVCNVKKLINEKKEDGKVFWQNLAGYKRQEALRPYLSSEEDRKKGKKFARYQFGDLLLHLEKKHGEDWGKVYDEAWERIDKKVEGLSKHIKLEEERRSEDAQSKAALTDWLRAKASFVIEGLKEADKDEFCRCELKLQKWYGDLRGKPFAIEAENSILDISGFSKQYNCAFIWQKDGVKKLNLYLIINYFKGGKLRFKKIKPEAFEANRFYTVINKKSGEIVPMEVNFNFDDPNLIILPLAFGKRQGREFIWNDLLSLETGSLKLANGRVIEKTLYNRRTRQDEPALFVALTFERREVLDSSNIKPMNLIGIDRGENIPAVIALTDPEGCPLSRFKDSLGNPTHILRIGESYKEKQRTIQAKKEVEQRRAGGYSRKYASKAKNLADDMVRNTARDLLYYAVTQDAMLIFENLSRGFGRQGKRTFMAERQYTRMEDWLTAKLAYEGLSKTYLSKTLAQYTSKTCSNCGFTITSADYDRVLEKLKKTATGWMTTINGKELKVEGQITYYNRYKRQNVVKDLSVELDRLSEESVNNDISSWTKGRSGEALSLLKKRFSHRPVQEKFVCLNCGFETHADEQAALNIARSWLFLRSQEYKKYQTNKTTGNTDKRAFVETWQSFYRKKLKEVWKPAV

SEQ ID NO: 132 - protein, 976 aa, synthetic construct
QEIKRINKIRRRLVKDSNTKKAGKTGPMKTLLVRVMTPDLRERLENLRKKPENIPQPISNTSRANLNKLLTDYTEMKKAILHVYWEEFQKDPVGLMSRVAQPAPKNIDQRKLIPVKDGNERLTSSGFACSQCCQPLYVYKLEQVNDKGKPHTNYFGRCNVSEHERLILLSPHKPEANDELVTYSLGKFGQRALDFYSIHVTKESTHPVKPLAQIAGNRYASGPVGKALSDACMGTIASFLSKYQDIIIEHQKVVKGNQKRLESLRELAGKENLEYPSVTLPPQPHTKEGVDAYNEVIARVRMWVNLNLWQKLKLSRDDAKPLLRLKGFPSFPLVERQANEVDWWDMVCNVKKLINEKKEDGKVFWQNLAGYKRQEALRPYLSSEEDRKKGKKFARYQLGDLLLHLEKKHGEDWGKVYDEAWERIDKKVEGLSKHIKLEEERRSEDAQSKAALTDWLRAKASFVIEGLKEADKDEFCRCELKLQKWYGDLRGKPFAIEAENSILDISGFSKQYNCAFIWQKDGVKKLNLYLIINYFKGGKLRFKKIKPEAFEANRFYTVINKKSGEIVPMEVNFNFDDPNLIILPLAFGKRQGREFIWNDLLSLETGSLKLANGRVIEKTLYNRRTRQDEPALFVALTFERREVLDSSNIKPMNLIGVDRGENIPAVIALTDPEGCPLSRFKDSLGNPTHILRIGESYKEKQRTIQAKKEVEQRRAGGYSRKYASKAKNLADDMVRNTARDLLYYAVTQDAMLIFENLSRGFGRQGKRTFMAERQYTRMEDWLTAKLAYEGLSKTYLSKTLAQYTSKTCSNCGFTITSADYDRVLEKLKKTATGWMTTINGKELKVEGQITYYNRRKRQNVVKDLSVELDRLSEESVNNDISSWTKGRSGEALSLLKKRFSHRPVQEKFVCLNCGFETHADEQAALNIARSWLFLRSQEYKKYQTNKTTGNTDKRAFVETWQSFYRKKLKEVWKPAV

SEQ ID NO: 133 - protein, 976 aa, synthetic construct
QEIKRINKIRRRLVKDSNTKKAGKTGPMKTLLVRVMTPDLRERLENLRKKPENIPQPISNTSRANLNKLLTDYTEMKKAILHVYWEEFQKDPVGLMSRVAQPAPKNIDQRKLIPVKDGNERLTSSGFACSQCCQPLYVYKLEQVNDKGKPHTNYFGRCNVSEHERLILLSPHKPEANDELVTYSLGKFGQRALDFYSIHVTKESTHPVKPLAQIAGNRYASGPVGKALSDACMGTIASFLSKYQDIIIEHQKVVKGNQKRLESLRELAGKENLEYPSVTLPPQPHTKEGVDAYNEVIARVRMWVNLNLWQKLKLSRDDAKPLLRLKGFPSFPLVERQANEVDWWDMVCNVKKLINEKKEDGKVFWQNLAGYKRQEALRPYLSSEEDRKKGKKFARYQLGDLLKHLEKKHGEDWGKVYDEAWERIDKKVEGLSKHIKLEEERRSEDAQSKAALTDWLRAKASFVIEGLKEADKDEFCRCELKLQKWYGDLRGKPFAIEAENSILDISGFSKQYNCAFIWQKDGVKKLNLYLIINYFKGGKLRFKKIKPEAFEANRFYTVINKKSGEIVPMEVNFNFDDPNLIILPLAFGKRQGREFIWNDLLSLETGSLKLANGRVIEKTLYNRRTRQDEPALFVALTFERREVLDSSNIKPMNLIGVDRGENIPAVIALTDPEGCPLSRFKDSLGNPTHILRIGESYKEKQRTIQAKKEVEQRRAGGYSRKYASKAKNLADDMVRNTARDLLYYAVTQDAMLIFENLSRGFGRQGKRTFMAERQYTRMEDWLTAKLAYEGLSKTYLSKTLAQYTSKTCSNCGFTITSADYDRVLEKLKKTATGWMTTINGKELKVEGQITYYNRRKRQNVVKDLSVELDRLSEESVNNDISSWTKGRSGEALSLLKKRFSHRPVQEKFVCLNCGFETHADEQAALNIARSWLFLRSQEYKKYQTNKTTGNTDKRAFVETWQSFYRKKLKEVWKPAV

SEQ ID NO: 134 - protein, 976 aa, synthetic construct
QEIKRINKIRRRLVKDSNTKKAGKTGPMKTLLVRVMTPDLRERLENLRKKPENIPQPISNTSRANLNKLLTDYTEMKKAILHVYWEEFQKDPVGLMSRVAQPAPKNIDQRKLIPVKDGNERLTSSGFACSQCCQPLYVYKLEQVNDKGKPHTNYFGRCNVSEHERLILLSPHKPEANDELVTYSLGKFGQRALDFYSIHVTKESTHPVKPLAQIAGNRYASGPVGKALSDACMGTIASFLSKYQDIIIEHQKVVKGNQKRLESLRELAGKENLEYPSVTLPPQPHTKEGVDAYNEVIARVRMWVNLNLWQKLKLSRDDAKPLLRLKGFPSFPLVERQANEVDWWDMVCNVKKLINEKKEDGKVFWQNLAGYKRQEALRPYLSSEEDRKKGKKFARYQLGDLLLHLEKKHGEDWGKVYDEAWERIDKKVEGLSKHIKLEEERRSEDAQSKAALTDWLRAKASFVIEGLKEADKDEFCRCELKLQKWYGDLRGKPFAIEAENSILDISGFSKQYNCAFIWQKDGVKKLNLYLIINYFKGGKLRFKKIKPEAFEANRFYTVINKKSGEIVPMEVNFNFDDPNLIILPLAFGKRQGREFIWNDLLSLETGSLKLANGRVIEKTLYNRRTRQDEPALFVALTFERREVLDSSNIKPMNLIGVDRGENIPAVIALTDPEGCPLSRFKDSLGNPTHILRIGESYKEKQRTIQAKKEVEQRRAGGYSRKYASKAKNLADDMVRNTARDLLYYAVTQDAMLIFENLSRGFGRQGKRTFMAERQYTRMEDWLTAKLAYEGLSKTYLSKTLAQYTSKTCSNCGFTITSADYDRVLEKLKKTATGWMTTINGKELKVEGQITYYNRYKRQNVVKDLSVELDRLSEESVNNDISSWTKGRSGEALSLLKKRFSHRPVQEKFVCLNCGFETHADEQAALNIARSWLFLRSQEYKKYQTNKTTGNTDKRAFVETWQSFYRKKLKEVWKPAV

SEQ ID NO: 135 - protein, 977 aa, synthetic construct
QEIKRINKIRRRLVKDSNTKKAGKTGPMKTLLVRVMTPDLRERLENLRKKPENIPQPISNTSRANLNKLLTDYTEMKKAILHVYWEEFQKDPVGLMSRVAQPASKKIDQNKLKPEMDEKGNLTTAGFACSQCGQPLFVYKLEQVSEKGKAYTNYFGRCNVAEHEKLILLAQLKPEKDSDEAVTYSLGKFGQRALDFYSIHVTKESTHPVKPLAQIAGNRYASGPVGKALSDACMGTIASFLSKYQDIIIEHQKVVKGNQKRLESLRELAGKENLEYPSVTLPPQPHTKEGVDAYNEVIARVRMWVNLNLWQKLKLSRDDAKPLLRLKGFPSFPLVERQANEVDWWDMVCNVKKLINEKKEDGKVFWQNLAGYKRQEALRPYLSSEEDRKKGKKFARYQFGDLLLHLEKKHGEDWGKVYDEAWERIDKKVEGLSKHIKLEEERRSEDAQSKAALTDWLRAKASFVIEGLKEADKDEFCRCELKLQKWYGDLRGKPFAIEAENSILDISGFSKQYNCAFIWQKDGVKKLNLYLIINYFKGGKLRFKKIKPEAFEANRFYTVINKKSGEIVPMEVNFNFDDPNLIILPLAFGKRQGREFIWNDLLSLETGSLKLANGRVIEKTLYNRRTRQDEPALFVALTFERREVLDSSNIKPMNLIGIDRGENIPAVIALTDPEGCPLSRFKDSLGNPTHILRIGESYKEKQRTIQAKKEVEQRRAGGYSRKYASKAKNLADDMVRNTARDLLYYAVTQDAMLIFENLSRGFGRQGKRTFMAERQYTRMEDWLTAKLAYEGLSKTYLSKTLAQYTSKTCSNCGFTITSADYDRVLEKLKKTATGWMTTINGKELKVEGQITYYNRYKRQNVVKDLSVELDRLSEESVNNDISSWTKGRSGEALSLLKKRFSHRPVQEKFVCLNCGFETHADEQAALNIARSWLFLRSQEYKKYQTNKTTGNTDKRAFVETWQSFYRKKLKEVWKPAV

SEQ ID NO: 136 - protein, 977 aa, synthetic construct
QEIKRINKIRRRLVKDSNTKKAGKTGPMKTLLVRVMTPDLRERLENLRKKPENIPQPISNTSRANLNKLLTDYTEMKKAILHVYWEEFQKDPVGLMSRVAQPASKKIDQNKLKPEMDEKGNLTTAGFACSQCGQPLFVYKLEQVSEKGKAYTNYFGRCNVAEHEKLILLAQLKPEKDSDEAVTYSLGKFGQRALDFYSIHVTKESTHPVKPLAQIAGNRYASGPVGKALSDACMGTIASFLSKYQDIIIEHQKVVKGNQKRLESLRELAGKENLEYPSVTLPPQPHTKEGVDAYNEVIARVRMWVNLNLWQKLKLSRDDAKPLLRLKGFPSFPLVERQANEVDWWDMVCNVKKLINEKKEDGKVFWQNLAGYKRQEALRPYLSSEEDRKKGKKFARYQLGDLLLHLEKKHGEDWGKVYDEAWERIDKKVEGLSKHIKLEEERRSEDAQSKAALTDWLRAKASFVIEGLKEADKDEFCRCELKLQKWYGDLRGKPFAIEAENSILDISGFSKQYNCAFIWQKDGVKKLNLYLIINYFKGGKLRFKKIKPEAFEANRFYTVINKKSGEIVPMEVNFNFDDPNLIILPLAFGKRQGREFIWNDLLSLETGSLKLANGRVIEKTLYNRRTRQDEPALFVALTFERREVLDSSNIKPMNLIGVDRGENIPAVIALTDPEGCPLSRFKDSLGNPTHILRIGESYKEKQRTIQAKKEVEQRRAGGYSRKYASKAKNLADDMVRNTARDLLYYAVTQDAMLIFENLSRGFGRQGKRTFMAERQYTRMEDWLTAKLAYEGLSKTYLSKTLAQYTSKTCSNCGFTITSADYDRVLEKLKKTATGWMTTINGKELKVEGQITYYNRRKRQNVVKDLSVELDRLSEESVNNDISSWTKGRSGEALSLLKKRFSHRPVQEKFVCLNCGFETHADEQAALNIARSWLFLRSQEYKKYQTNKTTGNTDKRAFVETWQSFYRKKLKEVWKPAV

SEQ ID NO: 137 - protein, 977 aa, synthetic construct
QEIKRINKIRRRLVKDSNTKKAGKTGPMKTLLVRVMTPDLRERLENLRKKPENIPQPISNTSRANLNKLLTDYTEMKKAILHVYWEEFQKDPVGLMSRVAQPASKKIDQNKLKPEMDEKGNLTTAGFACSQCGQPLFVYKLEQVSEKGKAYTNYFGRCNVAEHEKLILLAQLKPEKDSDEAVTYSLGKFGQRALDFYSIHVTKESTHPVKPLAQIAGNRYASGPVGKALSDACMGTIASFLSKYQDIIIEHQKVVKGNQKRLESLRELAGKENLEYPSVTLPPQPHTKEGVDAYNEVIARVRMWVNLNLWQKLKLSRDDAKPLLRLKGFPSFPLVERQANEVDWWDMVCNVKKLINEKKEDGKVFWQNLAGYKRQEALRPYLSSEEDRKKGKKFARYQLGDLLKHLEKKHGEDWGKVYDEAWERIDKKVEGLSKHIKLEEERRSEDAQSKAALTDWLRAKASFVIEGLKEADKDEFCRCELKLQKWYGDLRGKPFAIEAENSILDISGFSKQYNCAFIWQKDGVKKLNLYLIINYFKGGKLRFKKIKPEAFEANRFYTVINKKSGEIVPMEVNFNFDDPNLIILPLAFGKRQGREFIWNDLLSLETGSLKLANGRVIEKTLYNRRTRQDEPALFVALTFERREVLDSSNIKPMNLIGVDRGENIPAVIALTDPEGCPLSRFKDSLGNPTHILRIGESYKEKQRTIQAKKEVEQRRAGGYSRKYASKAKNLADDMVRNTARDLLYYAVTQDAMLIFENLSRGFGRQGKRTFMAERQYTRMEDWLTAKLAYEGLSKTYLSKTLAQYTSKTCSNCGFTITSADYDRVLEKLKKTATGWMTTINGKELKVEGQITYYNRRKRQNVVKDLSVELDRLSEESVNNDISSWTKGRSGEALSLLKKRFSHRPVQEKFVCLNCGFETHADEQAALNIARSWLFLRSQEYKKYQTNKTTGNTDKRAFVETWQSFYRKKLKEVWKPAV

SEQ ID NO: 138 - protein, 977 aa, synthetic construct
QEIKRINKIRRRLVKDSNTKKAGKTGPMKTLLVRVMTPDLRERLENLRKKPENIPQPISNTSRANLNKLLTDYTEMKKAILHVYWEEFQKDPVGLMSRVAQPASKKIDQNKLKPEMDEKGNLTTAGFACSQCGQPLFVYKLEQVSEKGKAYTNYFGRCNVAEHEKLILLAQLKPEKDSDEAVTYSLGKFGQRALDFYSIHVTKESTHPVKPLAQIAGNRYASGPVGKALSDACMGTIASFLSKYQDIIIEHQKVVKGNQKRLESLRELAGKENLEYPSVTLPPQPHTKEGVDAYNEVIARVRMWVNLNLWQKLKLSRDDAKPLLRLKGFPSFPLVERQANEVDWWDMVCNVKKLINEKKEDGKVFWQNLAGYKRQEALRPYLSSEEDRKKGKKFARYQLGDLLLHLEKKHGEDWGKVYDEAWERIDKKVEGLSKHIKLEEERRSEDAQSKAALTDWLRAKASFVIEGLKEADKDEFCRCELKLQKWYGDLRGKPFAIEAENSILDISGFSKQYNCAFIWQKDGVKKLNLYLIINYFKGGKLRFKKIKPEAFEANRFYTVINKKSGEIVPMEVNFNFDDPNLIILPLAFGKRQGREFIWNDLLSLETGSLKLANGRVIEKTLYNRRTRQDEPALFVALTFERREVLDSSNIKPMNLIGVDRGENIPAVIALTDPEGCPLSRFKDSLGNPTHILRIGESYKEKQRTIQAKKEVEQRRAGGYSRKYASKAKNLADDMVRNTARDLLYYAVTQDAMLIFENLSRGFGRQGKRTFMAERQYTRMEDWLTAKLAYEGLSKTYLSKTLAQYTSKTCSNCGFTITSADYDRVLEKLKKTATGWMTTINGKELKVEGQITYYNRYKRQNVVKDLSVELDRLSEESVNNDISSWTKGRSGEALSLLKKRFSHRPVQEKFVCLNCGFETHADEQAALNIARSWLFLRSQEYKKYQTNKTTGNTDKRAFVETWQSFYRKKLKEVWKPAV

SEQ ID NO: 139 - protein, 977 aa, synthetic construct
QEIKRINKIRRRLVKDSNTKKAGKTGPMKTLLVRVMTPDLRERLENLRKKPENIPQPISNTSRANLNKLLTDYTEMKKAILHVYWEEFQKDPVGLMSRVAQPASKKIDQNKLKPEMDEKGNLTTAGFACSQCGQPLFVYKLEQVSEKGKAYTNYFGRCNVAEHEKLILLAQLKPEKDSDEAVTYSLGKFGQRALDFYSIHVTRESNHPVKPLEQIGGNSCASGPVGKALSDACMGAVASFLTKYQDIILEHQKVIKKNEKRLANLKDIASANGLAFPKITLPPQPHTKEGIEAYNNVVAQIVIWVNLNLWQKLKIGRDEAKPLQRLKGFPSFPLVERQANEVDWWDMVCNVKKLINEKKEDGKVFWQNLAGYKRQEALRPYLSSEEDRKKGKKFARYQLGDLLLHLEKKHGEDWGKVYDEAWERIDKKVEGLSKHIKLEEERRSEDAQSKAALTDWLRAKASFVIEGLKEADKDEFCRCELKLQKWYGDLRGKPFAIEAENSILDISGFSKQYNCAFIWQKDGVKKLNLYLIINYFKGGKLRFKKIKPEAFEANRFYTVINKKSGEIVPMEVNFNFDDPNLIILPLAFGKRQGREFIWNDLLSLETGSLKLANGRVIEKTLYNRRTRQDEPALFVALTFERREVLDSSNIKPMNLIGVDRGENIPAVIALTDPEGCPLSRFKDSLGNPTHILRIGESYKEKQRTIQAKKEVEQRRAGGYSRKYASKAKNLADDMVRNTARDLLYYAVTQDAMLIFENLSRGFGRQGKRTFMAERQYTRMEDWLTAKLAYEGLSKTYLSKTLAQYTSKTCSNCGFTITSADYDRVLEKLKKTATGWMTTINGKELKVEGQITYYNRYKRQNVVKDLSVELDRLSEESVNNDISSWTKGRSGEALSLLKKRFSHRPVQEKFVCLNCGFETHADEQAALNIARSWLFLRSQEYKKYQTNKTTGNTDKRAFVETWQSFYRKKLKEVWKPAV

SEQ ID NO: 140 - protein, 978 aa, synthetic construct
MQEIKRINKIRRRLVKDSNTKKAGKTGPMKTLLVRVMTPDLRERLENLRKKPENIPQPISNTSRANLNKLLTDYTEMKKAILHVYWEEFQKDPVGLMSRVAQPAPKNIDQRKLIPVKDGNERLTSSGFACSQCCQPLYVYKLEQVNDKGKPHTNYFGRCNVSEHERLILLSPHKPEANDELVTYSLGKFGQRALDFYSIHVTRESNHPVKPLEQIGGNSCASGPVGKALSDACMGAVASFLTKYQDIILEHQKVIKKNEKRLANLKDIASANGLAFPKITLPPQPHTKEGIEAYNNVVAQIVIWVNLNLWQKLKIGRDEAKPLQRLKGFPSFPLVERQANEVDWWDMVCNVKKLINEKKEDGKVFWQNLAGYKRQEALLPYLSSEEDRKKGKKFARYQFGDLLLHLEKKHGEDWGKVYDEAWERIDKKVEGLSKHIKLEEERRSEDAQSKAALTDWLRAKASFVIEGLKEADKDEFCRCELKLQKWYGDLRGKPFAIEAENSILDISGFSKQYNCAFIWQKDGVKKLNLYLIINYFKGGKLRFKKIKPEAFEANRFYTVINKKSGEIVPMEVNFNFDDPNLIILPLAFGKRQGREFIWNDLLSLETGSLKLANGRVIEKTLYNRRTRQDEPALFVALTFERREVLDSSNIKPMNLIGIDRGENIPAVIALTDPEGCPLSRFKDSLGNPTHILRIGESYKEKQRTIQAAKEVEQRRAGGYSRKYASKAKNLADDMVRNTARDLLYYAVTQDAMLIFENLSRGFGRQGKRTFMAERQYTRMEDWLTAKLAYEGLPSKTYLSKTLAQYTSKTCSNCGFTITSADYDRVLEKLKKTATGWMTTINGKELKVEGQITYYNRYKRQNVVKDLGVELDRLSEESVNNDISSWTKGRSGEALSLLKKRFSHRPVQEKFVCLNCGFETHADEQAALNIARSWLFLRSQEYKKYQTNKTTGNTDKRAFVETWQSFYRKKLKEVWKPAV

SEQ ID NO: 141 - protein, 986 aa, synthetic construct; identical to SEQ ID NO: 56

SEQ ID NO: 142 - protein, 978 aa, synthetic construct
MQEIKRINKIRRRLVKDSNTKKAGKTGPMKTLLVRVMTPDLRERLENLRKKPENIPQPISNTSRANLNKLLTDYTEMKKAILHVYWEEFQKDPVGLMSRVAQPAPKNIDQRKLIPVKDGNERLTSSGFACSQCCQPLYVYKLEQVNDKGKPHTNYFGRCNVSEHERLILLSPHKPEANDELVTYSLGKFGQRALDFYSIHVTRESNHPVKPLEQIGGNSCASGPVGKALSDACMGAVASFLTKYQDIILEHQKVIKKNEKRLANLKDIASANGLAFPKITLPPQPHTKEGIEAYNNVVAQIVIWVNLNLWQKLKIGRDEAKPLQRLKGFPSFPLVERQANEVDWWDMVCNVKKLINEKKEDGKVFWQNLAGYKRQEALRPYLSSEEDRKKGKKFARYQFGDLLLHLEKKHGEDWGKVYDEAWERIDKKVEGLSKHIKLEEERRSEDAQSKAALTDWLRAKASFVIEGLKEADKDEFCRCELKLQKWYGDLRGKPFAIEAENSILDISGFSKQYNCAFIWQKDGVKKLNLYLIINYFKGGKLRFKKIKPEAFEANRFYTVINKKSGEIVPMEVNFNFDDPNLIILPLAFGKRQGREFIWNDLLSLETGSLKLANGRVIEKTLYNRRTRQDEPALFVALTFERREVLDSSNIKPVNLIGVDRGENIPAVIALTDPEGCPLPEFKDSSGGPTDILRIGEGYKEKQRAIQAAKEVEQRRAGGYSRKFASKSRNLADDMVRNSARDLFYHAVTHDAVLVFENLSRGFGRQGKRTFMTERQYTKMEDWLTAKLAYEGLTSKTYLSKTLAQYTSKTCSNCGFTITSADYDRVLEKLKKTATGWMTTINGKELKVEGQITYYNRYKRQNVVKDLSVELDRLSEESVNNDISSWTKGRSGEALSLLKKRFSHRPVQEKFVCLNCGFETHADEQAALNIARSWLFLRSQEYKKYQTNKTTGNTDKRAFVETWQSFYRKKLKEVWKPAV

SEQ ID NO: 143 - protein, 972 aa, synthetic construct
MQEIKRINKIRRRLVKDSNTKKAGKTGPMKTLLVRVMTPDLRERLENLRKKPENIPQPISNTSRANLNKLLTDYTEMKKAILHVYWEEFQKDPVGLMSRVAQPAPKNIDQRKLIPVKDGNERLTSSGFACSQCCQPLYVYKLEQVNDKGKPHTNYFGRCNVSEHERLILLSPHKPEANDELVTYSLGKFGQRALDFYSIHVTRESNHPVKPLEQIGGNSCASGPVGKALSDACMGAVASFLTKYQDIILEHQKVIKKNEKRLANLKDIASANGLAFPKITLPPQPHTKEGIEAYNNVVAQIVIWVNLNLWQKLKIGRDEAKPLQRLKGFPSFPLVERQANEVDWWDMVCNVKKLINEKKEDGKVFWQNLAGYKRQEALRPYLSSEEDRKKGKKFARYQFGDLLLHLEKKHGEDWGKVYDEAWERIDKKVEGLSKHIKLEEERRSEDAQSKAALTDWLRAKASFVIEGLKEADKDEFCRCELKLQKWYGDLRGKPFAIEAENSILDISGFSKQYNCAFIWQKDGVKKLNLYLIINYFKGGKLRFKKIKPEAFEANRFYTVINKKSGEIVPMEVNFNFDDPNLIILPLAFGKRQGREFIWNDLLSLETGSLKLANGRVIEKTLYNRRTRQDEPALFVALTFERREVLDSSNIKPMNLIGIDRGENIPAVIALTDPEGCPLSRFKDSLGNPTHILRIGESYKEKQRTIQAKKEVEQRRAGGYSRKYASKAKNLADDMVRNTARDLLYYAVTQDAMLIFENLSRGFGRQGKRTFMAERQYTRMEDWLTAKLAYEGLSKTYLSKTLAQYTSKTCSNCGFTITSADYDRVLEKLKKTATGWMTTINGKELKVEGQITYYNRYKRQNVVKDLSVELDRLSEESVNNDISSWTKGRSGEALSLLKKRFSHRPVQEKFVCLNCGFETHADEQAALNIARSWLFLNSNSTEFKSYKSGKQPFVGAWQAFYKRRLKEVWKPNA

SEQ ID NO: 144 - protein, 978 aa, synthetic construct
QEIKRINKIRRRLVKDSNTKKAGKTGPMKTLLVRVMTPDLRERLENLRKKPENIPQPISNTSRANLNKLLTDYTEMKKAILHVYWEEFQKDPVGLMSRVAQPASKKIDQNKLKPEMDEKGNLTTAGFACSQCGQPLFVYKLEQVSEKGKAYTNYFGRCNVAEHEKLILLAQLKPEKDSDEAVTYSLGKFGQRALDFYSIHVTKESTHPVKPLAQIAGNRYASGPVGKALSDACMGTIASFLSKYQDIIIEHQKVVKGNQKRLESLRELAGKENLEYPSVTLPPQPHTKEGVDAYNEVIARVRMWVNLNLWQKLKLSRDDAKPLLRLKGFPSFPLVERQANEVDWWDMVCNVKKLINEKKEDGKVFWQNLAGYKRQEALRPYLSSEEDRKKGKKFARYQLGDLLLHLEKKHGEDWGKVYDEAWERIDKKVEGLSKHIKLEEERRSEDAQSKAALTDWLRAKASFVIEGLKEADKDEFCRCELKLQKWYGDLRGKPFAIEAENSILDISGFSKQYNCAFIWQKDGVKKLNLYLIINYFKGGKLRFKKIKPEAFEANRFYTVINKKSGEIVPMEVNFNFDDPNLIILPLAFGKRQGREFIWNDLLSLETGSLKLANGRVIEKTLYNRRTRQDEPALFVALTFERREVLDSSNIKPMNLIGVDRGENIPAVIALTDPEGCPLSRFKDSLGNPTHILRIGESYKEKQRTIQAKKEVEQRRAGGYSRKYASKAKNLADDMVRNTARDLLYYAVTQDAMLIFENLSRGFGRQGKRTFMAERQYTRMEDWLTAKLAYEGLSKTYLSKTLAQYTSKTCSNCGFTIHTSADYDRVLEKLKKTATGWMTTINGKELKVEGQITYYNRYKRQNVVKDLSVELDRLSEESVNNDISSWTKGRSGEALSLLKKRFSHRPVQEKFVCLNCGFETHADEQAALNIARSWLFLRSQEYKKYQTNKTTGNTDKRAFVETWQSFYRKKLKEVWKPAV

SEQ ID NO: 145 - protein, 978 aa, synthetic construct
QEIKRINKIRRRLVKDSNTKKAGKTGPMKTLLVRVMTPDLRERLENLRKKPENIPQPISNTSRANLNKLLTDYTEMKKAILHVYWEEFQKDPVGLMSRVAQPASKKIDQNKLKPEMDEKGNLTTAGFACSQCGQPLFVYKLEQVSEKGKAYTNYFGRCNVAEHEKLILLAQLKPEKDSDEAVTYSLGKFGQRALDFYSIHVTKESTHPVKPLAQIAGNRYASGPVGKALSDACMGTIASFLSKYQDIIIEHQKVVKGNQKRLESLRELAGKENLEYPSVTLPPQPHTKEGVDAYNEVIARVRMWVNLNLWQKLKLSRDDAKPLLRLKGFPSFPLVERQANEVDWWDMVCNVKKLINEKKEDGKVFWQNLAGYKRQEALRPYLSSEEDRKKGKKFARYQLGDLLLHLEKKHGEDWGKVYDEAWERIDKKVEGLSKHIKLEEERRSEDAQSKAALTDWLRAKASFVIEGLKEADKDEFCRCELKLQKWYGDLRGKPFAIEAENSILDISGFSKQYNCAFIWQKDGVKKLNLYLIINYFKGGKLRFKKIKPEAFEANRFYTVINKKSGEIVPMEVNFNFDDPNLIILPLAFGKRQGREFIWNDLLSLETGSLKLANGRVIEKTLYNRRTRQDEPALFVALTFERREVLDSSNIKPMNLIGVDRGENIPAVIALTDPEGCPLSRFKDSLGNPTHILRIGESYKEKQRTIQAKKEVEQRRAGGYSRKYASKAKNLADDMVRNTARDLLYYAVTQDAMLIFENLSRGFGRQGKRTFMAERQYTRMEDWLTAKLAYEGLPSKTYLSKTLAQYTSKTCSNCGFTITSADYDRVLEKLKKTATGWMTTINGKELKVEGQITYYNRYKRQNVVKDLSVELDRLSEESVNNDISSWTKGRSGEALSLLKKRFSHRPVQEKFVCLNCGFETHADEQAALNIARSWLFLRSQEYKKYQTNKTTGNTDKRAFVETWQSFYRKKLKEVWKPAV

SEQ ID NO: 146 - protein, 977 aa, synthetic construct
QEIKRINKIRRRLVKDSNTKKAGKTGPMKTLLVRVMTPDLRERLENLRKKPENIPQPISNTSRANLNKLLTDYTEMKKAILHVYWEEFQKDPVGLMSRVAQPASKKIDQNKLKPEMDEKGNLTTAGFACSQCGQPLFVYKLEQVSEKGKAYTNYFGRCNVAEHEKLILLAQLKPEKDSDEAVTYSLGKFGQRALDFYSIHVTKESTHPVKPLAQIAGNRYASGPVGKALSDACMGTIASFLSKYQDIIIEHQKVVKGNQKRLESLRELAGKENLEYPSVTLPPQPHTKEGVDAYNEVIARVRMWVNHNLWQKLKLSRDDAKPLLRLKGFPSFPLVERQANEVDWWDMVCNVKKLINEKKEDGKVFWQNLAGYKRQEALRPYLSSEEDRKKGKKFARYQLGDLLLHLEKKHGEDWGKVYDEAWERIDKKVEGLSKHIKLEEERRSEDAQSKAALTDWLRAKASFVIEGLKEADKDEFCRCELKLQKWYGDLRGKPFAIEAENSILDISGFSKQYNCAFIWQKDGVKKLNLYLIINYFKGGKLRFKKIKPEAFEANRFYTVINKKSGEIVPMEVNFNFDDPNLIILPLAFGKRQGREFIWNDLLSLETGSLKLANGRVIEKTLYNRRTRQDEPALFVALTFERREVLDSSNIKPMNLIGVDRGENIPAVIALTDPEGCPLSRFKDSLGNPTHILRIGESYKEKQRTIQAKKEVEQRRAGGYSRKYASKAKNLADDMVRNTARDLLYYAVTQDAMLIFENLSRGFGRQGKRTFMAERQYTRMEDWLTAKLAYEGLSKTYLSKTLAQYTSKTCSNCGFTITSADYDRVLEKLKKTATGWMTTINGKELKVEGQITYYNRYKRQNVVKDLSVELDRLSEESVNNDISSWTKGRSGEALSLLKKRFSHRPVQEKFVCLNCGFETHADEQAALNIARSWLFLRSQEYKKYQTNKTTGNTDKRAFVETWQSFYRKKLKEVWKPAV

SEQ ID NO: 147 - protein, 978 aa, synthetic construct
QEIKRINKIRRRLVKDSNTKKAGKTGPMKTLLVRVMTPDLRERLENLRKKPENIPQPISNTSRANLNKLLTDYTEMKKAILHVYWEEFQKDPVGLMSRVAQPASKKIDQNKLKPEMDEKGNLTTAGFACSQCGQPLFVYKLEQVSEKGKAYTNYFGRCNVAEHEKLILLAQLKPEKDSDEAVTYSLGKFGQRALDFYSIHVTKESTHPVKPLAQIAGNRYASGAPVGKALSDACMGTIASFLSKYQDIIIEHQKVVKGNQKRLESLRELAGKENLEYPSVTLPPQPHTKEGVDAYNEVIARVRMWVNLNLWQKLKLSRDDAKPLLRLKGFPSFPLVERQANEVDWWDMVCNVKKLINEKKEDGKVFWQNLAGYKRQEALRPYLSSEEDRKKGKKFARYQLGDLLLHLEKKHGEDWGKVYDEAWERIDKKVEGLSKHIKLEEERRSEDAQSKAALTDWLRAKASFVIEGLKEADKDEFCRCELKLQKWYGDLRGKPFAIEAENSILDISGFSKQYNCAFIWQKDGVKKLNLYLIINYFKGGKLRFKKIKPEAFEANRFYTVINKKSGEIVPMEVNFNFDDPNLIILPLAFGKRQGREFIWNDLLSLETGSLKLANGRVIEKTLYNRRTRQDEPALFVALTFERREVLDSSNIKPMNLIGVDRGENIPAVIALTDPEGCPLSRFKDSLGNPTHILRIGESYKEKQRTIQAKKEVEQRRAGGYSRKYASKAKNLADDMVRNTARDLLYYAVTQDAMLIFENLSRGFGRQGKRTFMAERQYTRMEDWLTAKLAYEGLSKTYLSKTLAQYTSKTCSNCGFTITSADYDRVLEKLKKTATGWMTTINGKELKVEGQITYYNRYKRQNVVKDLSVELDRLSEESVNNDISSWTKGRSGEALSLLKKRFSHRPVQEKFVCLNCGFETHADEQAALNIARSWLFLRSQEYKKYQTNKTTGNTDKRAFVETWQSFYRKKLKEVWKPAV

SEQ ID NO: 148 - protein, 978 aa, synthetic construct
RQEIKRINKIRRRLVKDSNTKKAGKTGPMKTLLVRVMTPDLRERLENLRKKPENIPQPISNTSRANLNKLLTDYTEMKKAILHVYWEEFQKDPVGLMSRVAQPASKKIDQNKLKPEMDEKGNLTTAGFACSQCGQPLFVYKLEQVSEKGKAYTNYFGRCNVAEHEKLILLAQLKPEKDSDEAVTYSLGKFGQRALDFYSIHVTKESTHPVKPLAQIAGNRYASGPVGKALSDACMGTIASFLSKYQDIIIEHQKVVKGNQKRLESLRELAGKENLEYPSVTLPPQPHTKEGVDAYNEVIARVRMWVNLNLWQKLKLSRDDAKPLLRLKGFPSFPLVERQANEVDWWDMVCNVKKLINEKKEDGKVFWQNLAGYKRQEALRPYLSSEEDRKKGKKFARYQLGDLLLHLEKKHGEDWGKVYDEAWERIDKKVEGLSKHIKLEEERRSEDAQSKAALTDWLRAKASFVIEGLKEADKDEFCRCELKLQKWYGDLRGKPFAIEAENSILDISGFSKQYNCAFIWQKDGVKKLNLYLIINYFKGGKLRFKKIKPEAFEANRFYTVINKKSGEIVPMEVNFNFDDPNLIILPLAFGKRQGREFIWNDLLSLETGSLKLANGRVIEKTLYNRRTRQDEPALFVALTFERREVLDSSNIKPMNLIGVDRGENIPAVIALTDPEGCPLSRFKDSLGNPTHILRIGESYKEKQRTIQAKKEVEQRRAGGYSRKYASKAKNLADDMVRNTARDLLYYAVTQDAMLIFENLSRGFGRQGKRTFMAERQYTRMEDWLTAKLAYEGLSKTYLSKTLAQYTSKTCSNCGFTITSADYDRVLEKLKKTATGWMTTINGKELKVEGQITYYNRYKRQNVVKDLSVELDRLSEESVNNDISSWTKGRSGEALSLLKKRFSHRPVQEKFVCLNCGFETHADEQAALNIARSWLFLRSQEYKKYQTNKTTGNTDKRAFVETWQSFYRKKLKEVWKPAV

SEQ ID NO: 149 - protein, 978 aa, synthetic construct
QEIKRINKIRRRLVKDSNTKKAGKTGPMKTLLVRVMTPDLRERLENLRKKPENIPQPISNTSRANLNKLLTDYTEMKKAILHVYWEEFQKDPVGLMSRVAQPASKKIDQNKLKPEMDEKGNLTTAGFACSQCGQPLFVYKLEQVSEKGKAYTNYFGRCNVAEHEKLILLAQLKPEKDSDEAVTYSLGKFGQRALDFYSIHVTKESTHPVKPLAQIAGNRYASGPVGKALSDACMGTIASFLSKYQDIIIEHQKVVKGNQKRLESLRELAGKENLEYPSVTLPPQPHTKEGVDAYNEVIARVRMWVNLNLWQKLKLSRDDAKPLLRLKGFPSFPLVERQANEVDWWDMVCNVKKLINEKKEDGKVFWQNLAGYKRQEALRPYLSSEEDRKKGKKFARYQLGDLLLHLEKKHGEDWGKVYDEAWERIDKKVEGLSKHIKLEEERRSEDAQSKAALTDWLRAKASFVIEGLKEADKDEFCRCELKLQKWYGDLRGKPFAIEAENSILDISGFSKQYNCAFIWQKDGVKKLNLYLIINYFKGGKLRFKKIKPEAFEANRFYTVINKKSGEIVPMEVNFNFDDPNLIILPLAFGKRQGREFIWNDLLSLETGSLKLANGRVIEKTLYNRRTRQDEPALFVALTFERREVLDSSNIKPMNLIGVDRGENIPAVIALTDPEGCPLSRFKDSLGNPTHIQLRIGESYKEKQRTIQAKKEVEQRRAGGYSRKYASKAKNLADDMVRNTARDLLYYAVTQDAMLIFENLSRGFGRQGKRTFMAERQYTRMEDWLTAKLAYEGLSKTYLSKTLAQYTSKTCSNCGFTITSADYDRVLEKLKKTATGWMTTINGKELKVEGQITYYNRYKRQNVVKDLSVELDRLSEESVNNDISSWTKGRSGEALSLLKKRFSHRPVQEKFVCLNCGFETHADEQAALNIARSWLFLRSQEYKKYQTNKTTGNTDKRAFVETWQSFYRKKLKEVWKPAV

SEQ ID NO: 150 - protein, 977 aa, synthetic construct
QEIKRINKIRRRLVKDSNTKKAGKTGPMKTLLVRVMTPDLRERLENLRKKPENIPQPISNTSRANLNKLLTDYTEMKKAILHVYWEEFQKDPVGLMSRVAQPASKKIDQNKLKPEMDEKGNLTTAGFACSQCGQPLFVYKLEQVSEKGKAYTNYFGRCNVAEHEKLILLAQLKPEKDSDEAVTYSLGKFGQRALDFYSIHVTKESTHPVKPLAQIAGNRYASGPVGKALSDACMGTIASFLSKYQDIIIEHQKVVKGNQKRLESLRELAGKENLEYPSVTLPPQPHTKEGVDAYNEVIARVRMWVNLNLWQKLKLSRDDAKPLLRLKGFPSFPLVERQANEVDWWDMVCNVKKLINEKKEDGKVFWQNLAGYKRQEALRPYLSSEEDRKKGKKFARYQLGDLLLHLEKKHGEDWGKVYDEAWERIDKKVEGLSKHIKLEEERRSEDAQSKAALTDWLRAKASFVIEGLKEADKDEFCRCELKLQKWYGDLRGKPFAIEAENSILDISGFSKQYNCAFIWQKDGVKKLNLYLIINYFKGGKLRFKKIKPEAFEANRFYTVINKKSGEIVPMEVNFNFDDPNLIILPLAFGKRQGREFIWNDLLSLETGSLKLANGRVIEKTLYNRRTRQDEPALFVALTFERREVLDSSNIKPMNLIGVDRGENIPAVIALTDPEGCPLSRFKDSLGNPTHILRIGESYKEKQRTTQAKKEVEQRRAGGYSRKYASKAKNLADDMVRNTARDLLYYAVTQDAMLIFENLSRGFGRQGKRTFMAERQYTRMEDWLTAKLAYEGLSKTYLSKTLAQYTSKTCSNCGFTITSADYDRVLEKLKKTATGWMTTINGKELKVEGQITYYNRYKRQNVVKDLSVELDRLSEESVNNDISSWTKGRSGEALSLLKKRFSHRPVQEKFVCLNCGFETHADEQAALNIARSWLFLRSQEYKKYQTNKTTGNTDKRAFVETWQSFYRKKLKEVWKPAV

SEQ ID NO: 151 - protein, 977 aa, synthetic construct
QEIKRINKIRRRLVKDSNTKKAGKTGPMKTLLVRVMTPDLRERLENLRKKPENIPQPISNTSRANLNKLLTDYTEMKKAILHVYWEEFQKDPVGLMSRVAQPASKKIDQNKLKPEMDEKGNLTTAGFACSQCGQPLFVYKLEQVSEKGKAYTNYFGRCNVAEHEKLILLAQLKPEKDSDEAVTYSLGKFGQRALDFYSIHVTKESTHPVKPLAQIAGNRYASGPVGKALSDACMGTIASFLSKYQDIIIEHQKVVKGNQKRLESLRELAGKENLEYPSVTLPPQPHTKEGVDAYNEVIARVRMWVNLNLWQKLKLSRDDAKPLLRLKGFPSFPLVERQANEVDWWDMVCNVKKLINEKKEDGKVFWQNLAGYKRQEALRPYLSSEEDRKKGKKFARYQLGDLLLHLEKKHGEDWGKVYDEAWERIDKKVEGLSKHIKLEEERRSEDAQSKAALTDWLRAKASFVIEGLKEADKDEFCRCELKLQKWYGDLRGKPFAIEAENSILDISGFSKQYNCAFIWQKDGVKKLNLYLIINYFKGGKLRFKKIKPEAFEANRFYTVINKKSGEIVPMEVNFNFDDPNLIILPLAFGKRQGREFIWNDLLSLETGSLKLANGRVIEKTLYNRRTRQDEPALFVALTFERREVLDSSNIKPMNLIGVDRGENIPAVIALTDPEGCPLSRFKRSLGNPTHILRIGESYKEKQRTIQAKKEVEQRRAGGYSRKYASKAKNLADDMVRNTARDLLYYAVTQDAMLIFENLSRGFGRQGKRTFMAERQYTRMEDWLTAKLAYEGLSKTYLSKTLAQYTSKTCSNCGFTITSADYDRVLEKLKKTATGWMTTINGKELKVEGQITYYNRYKRQNVVKDLSVELDRLSEESVNNDISSWTKGRSGEALSLLKKRFSHRPVQEKFVCLNCGFETHADEQAALNIARSWLFLRSQEYKKYQTNKTTGNTDKRAFVETWQSFYRKKLKEVWKPAV

SEQ ID NO: 152 - protein, 977 aa, synthetic construct
QEIKRINKIRRRLVKDSNTKKAGKTYPMKTLLVRVMTPDLRERLENLRKKPENIPQPISNTSRANLNKLLTDYTEMKKAILHVYWEEFQKDPVGLMSRVAQPASKKIDQNKLKPEMDEKGNLTTAGFACSQCGQPLFVYKLEQVSEKGKAYTNYFGRCNVAEHEKLILLAQLKPEKDSDEAVTYSLGKFGQRALDFYSIHVTKESTHPVKPLAQIAGNRYASGPVGKALSDACMGTIASFLSKYQDIIIEHQKVVKGNQKRLESLRELAGKENLEYPSVTLPPQPHTKEGVDAYNEVIARVRMWVNLNLWQKLKLSRDDAKPLLRLKGFPSFPLVERQANEVDWWDMVCNVKKLINEKKEDGKVFWQNLAGYKRQEALRPYLSSEEDRKKGKKFARYQLGDLLLHLEKKHGEDWGKVYDEAWERIDKKVEGLSKHIKLEEERRSEDAQSKAALTDWLRAKASFVIEGLKEADKDEFCRCELKLQKWYGDLRGKPFAIEAENSILDISGFSKQYNCAFIWQKDGVKKLNLYLIINYFKGGKLRFKKIKPEAFEANRFYTVINKKSGEIVPMEVNFNFDDPNLIILPLAFGKRQGREFIWNDLLSLETGSLKLANGRVIEKTLYNRRTRQDEPALFVALTFERREVLDSSNIKPMNLIGVDRGENIPAVIALTDPEGCPLSRFKDSLGNPTHILRIGESYKEKQRTIQAKKEVEQRRAGGYSRKYASKAKNLADDMVRNTARDLLYYAVTQDAMLIFENLSRGFGRQGKRTFMAERQYTRMEDWLTAKLAYEGLSKTYLSKTLAQYTSKTCSNCGFTITSADYDRVLEKLKKTATGWMTTINGKELKVEGQITYYNRYKRQNVVKDLSVELDRLSEESVNNDISSWTKGRSGEALSLLKKRFSHRPVQEKFVCLNCGFETHADEQAALNIARSWLFLRSQEYKKYQTNKTTGNTDKRAFVETWQSFYRKKLKEVWKPAV

SEQ ID NO: 153 - protein, 977 aa, synthetic construct
QEIKRINKIRRRLVKDSNTKKAGKTGPMKTLLVRVMTPDLRERLENLRKKPENIPQPISNTSRANLNKLLTDYTEMKKAILHVYWEEFQKDPVGLMSRVAQPASKKIDQNKLKPEMDEKGNLTTAGFACSQCGQPLFVYKLEQVSEKGKAYTNYFGRCNVAEHEKLILLAQLKPEKDSDEAVTYSLGKFGQRALDFYSIHVTKESTHPVKPLAQIAGNRYASGPVGKALSDACMGTIASFLSKYQDIIIEHQKVVKGNQKRLESLRELAGKENLEYPSVTLPPQPHTKEGVDAYNEVIARVRMWVNLNLWQKLKLSRDDAKPLLRLKGFPSFPLVERQANEVDWWDMVCNVKKLINEKKEDGKVFWQNLAGYKRQEALRPYLSSEEDRKKGKKFARYQLGDLLLHLEKKHGEDWGKVYDEAWERIDKKVEGLSKHIKLEEERRSEDAQSKAALTDWLRAKASFVIEGLKEADKDEFCRCELKLQKWYGDLRGKPFAIEAENSILDISGFSKQYNCAFIWQKDGVKKLNLYLIINYFKGGKLRFKKIKPEAFEANRFYTVINKKSGEIVPMEVNFNFDDPNLIILPLAFGKRQGREFIWNDLLSLETGSLKLANGRVIEKTLYNRRTRQDEPALFVALTFERREVLDSSNIKPMNLIGVDRGENIPAVIALTDPEGCPLSRFKDSLGNPTHILRIGESYKEKQRTIQAKKEVEQRRAGGYSRKYASKAKNLADDMVRNTARDLLYYAVTQDAMLIFENLSRGFGRQGKRTFMAERQYTRMEDWLTAKLAYEGLSKTYLSKTLAQYTSKTCSNCGFTIHSADYDRVLEKLKKTATGWMTTINGKELKVEGQITYYNRYKRQNVVKDLSVELDRLSEESVNNDISSWTKGRSGEALSLLKKRFSHRPVQEKFVCLNCGFETHADEQAALNIARSWLFLRSQEYKKYQTNKTTGNTDKRAFVETWQSFYRKKLKEVWKPAV

SEQ ID NO: 154 - protein, 977 aa, synthetic construct
QEIKRINKIRRRLVKDSNTKKAGKTGPMKTLLVRVMTPDLRERLENLRKKPENIPQPISNTSRANLNKLLTDYTEMKKAILHVYWEEFQKDPVGLMSRVAQPASKKIDQNKLKPEMDEKGNLTTAGFACSQCGQPLFVYKLEQVSEKGKAYTNYFGRCNVAEHEKLILLAQLKPEKDSDEAVTYSLGKFGQRALDFYSIHVTKESTHPVKPLAQIAGNRYASGPVGKALSDACMGTIASFLSKYQDIIIEHQKVVKGNQKRLESLRELAGKENLEYPSVTLPPQPHTKEGVDAYNEVIARVRMWVNLNLWQKLKLSRDDAKPLLRLKGFPSFPLVERQANEVDWWDMVCNVKKLINEKKEDGKVFWQNLAGYKRQEALRPYLSSEEDRKKGKKFARYQLGDLLLHLEKKHGEDWGKVYDEAWERIDKKVEGLSKHIKLEEERRSEDAQSKAALTDWLRAKASFVIEGLKEADKDEFCRCELKLQKWYGDLRGKPFAIEAENSILDISGFSKQYNCAFIWQKDGVKKLNLYLIINYFKGGKLRFKKIKPEAFEANRFYTVINKKSGEIVPMEVNFNFDDPNLIILPLAFGKRQGREFIWNDLLSLETGSLKLANGRVIEKTLYNRRTRQDEPALFVALTFERREVLDSSNIKPMNLIGVDRGENIPAVIALTDPEGCPLSRFKDSLGNPTHILRIGESYKEKQRTIQAKKEVEQRRAGGYSRKYASKAKNLADDMVRNTARDLLYYAATQDAMLIFENLSRGFGRQGKRTFMAERQYTRMEDWLTAKLAYEGLSKTYLSKTLAQYTSKTCSNCGFTITSADYDRVLEKLKKTATGWMTTINGKELKVEGQITYYNRYKRQNVVKDLSVELDRLSEESVNNDISSWTKGRSGEALSLLKKRFSHRPVQEKFVCLNCGFETHADEQAALNIARSWLFLRSQEYKKYQTNKTTGNTDKRAFVETWQSFYRKKLKEVWKPAV

SEQ ID NO: 155 - protein, 977 aa, synthetic construct
QEIKRINKIRRRLVKDSNTKKAGKTGPMKTLLVRVMTPDLRERLENLRKKPENIPQPISNTSRANLNKLLTDYTEMKKAILHVYWEEFQKDPVGLMSRVAQPASKKIDQNKLKPEMDEKGNLTTAGFACSQCGQPLFVYKLEQVSEKGKAYTNYFGRCNVAEHEKLILLAQLKPEKDSDEAVTYSLGKFGQRALDFYSIHVTKESTHPVKPLAQIAGNRYASGPVGKALSDACMGTIASFLSKYQDIIIEHQKVVKGNQKRLESLRELAGKENLEYPSVTLPPQPHTKEGVDAYNEVIARVRMWVNLNLWQKLKLSRDDAKPLLRLKGFPSFPLVERQANEVDWWDMVCNVKKLINEKKEDGKVFWQNLAGYKRQEALRPYLSSEEDRKKGKKFARYQLGDLLLHLEKKHGEDWGKVYDEAWERIDKKVEGLSKHIKLEEERRSEDAQSKAALTDWLRAKASFVIEGLKEADKDEFCRCELKLQKWYGDLRGKPFAIEAENSILDISGFSKQYNCAFIWQKDGVKKLNLYLIINYFKGGKLRFKKIKPEAFEANRFYTVINKKSGEIVPMEVNFNFDDPNLIILPLAFGKRQGREFIWNDLLSLETGSLKLANGRVIEKTLYNRRTRQDEPALFVALTFERREVLDSSNIKPMNLIGVDRGENIPAVIALTDPEGCPLSRFKDSLGNPTHILRIGESYKEKQRTIQAAKEVEQRRAGGYSRKYASKAKNLADDMVRNTARDLLYYAVTQDAMLIFENLSRGFGRQGKRTFMAERQYTRMEDWLTAKLAYEGLSKTYLSKTLAQYTSKTCSNCGFTITSADYDRVLEKLKKTATGWMTTINGKELKVEGQITYYNRYKRQNVVKDLSVELDRLSEESVNNDISSWTKGRSGEALSLLKKRFSHRPVQEKFVCLNCGFETHADEQAALNIARSWLFLRSQEYKKYQTNKTTGNTDKRAFVETWQSFYRKKLKEVWKPAV

SEQ ID NO: 156 - protein, 978 aa, synthetic construct
QEIKRINKIRRRLVKDSNTKKAGKTRGPMKTLLVRVMTPDLRERLENLRKKPENIPQPISNTSRANLNKLLTDYTEMKKAILHVYWEEFQKDPVGLMSRVAQPASKKIDQNKLKPEMDEKGNLTTAGFACSQCGQPLFVYKLEQVSEKGKAYTNYFGRCNVAEHEKLILLAQLKPEKDSDEAVTYSLGKFGQRALDFYSIHVTKESTHPVKPLAQIAGNRYASGPVGKALSDACMGTIASFLSKYQDIIIEHQKVVKGNQKRLESLRELAGKENLEYPSVTLPPQPHTKEGVDAYNEVIARVRMWVNLNLWQKLKLSRDDAKPLLRLKGFPSFPLVERQANEVDWWDMVCNVKKLINEKKEDGKVFWQNLAGYKRQEALRPYLSSEEDRKKGKKFARYQLGDLLLHLEKKHGEDWGKVYDEAWERIDKKVEGLSKHIKLEEERRSEDAQSKAALTDWLRAKASFVIEGLKEADKDEFCRCELKLQKWYGDLRGKPFAIEAENSILDISGFSKQYNCAFIWQKDGVKKLNLYLIINYFKGGKLRFKKIKPEAFEANRFYTVINKKSGEIVPMEVNFNFDDPNLIILPLAFGKRQGREFIWNDLLSLETGSLKLANGRVIEKTLYNRRTRQDEPALFVALTFERREVLDSSNIKPMNLIGVDRGENIPAVIALTDPEGCPLSRFKDSLGNPTHILRIGESYKEKQRTIQAKKEVEQRRAGGYSRKYASKAKNLADDMVRNTARDLLYYAVTQDAMLIFENLSRGFGRQGKRTFMAERQYTRMEDWLTAKLAYEGLSKTYLSKTLAQYTSKTCSNCGFTITSADYDRVLEKLKKTATGWMTTINGKELKVEGQITYYNRYKRQNVVKDLSVELDRLSEESVNNDISSWTKGRSGEALSLLKKRFSHRPVQEKFVCLNCGFETHADEQAALNIARSWLFLRSQEYKKYQTNKTTGNTDKRAFVETWQSFYRKKLKEVWKPAV

SEQ ID NO: 157 - protein, 978 aa, synthetic construct
QEIKRINKIRRRLVKDSNTKKAGKTGPMKTLLVRVMTPDLRERLENLRKKPENIPQPISNTSRANLNKLLTDYTEMKKAILHVYWEEFQKDPVGLMSRVAQPASKKIDQNKLKPEMDEKGNLTTAGFACSQCGQPLFVYKLEQVSEKGKAYTNYFGRCNVAEHEKLILLAQLKPEKDSDEAVTYSLGKFGQRALDFYSIHVTKESTHPVKPLAQIAGNRYASYPVGKALSDACMGTIASFLSKYQDIIIEHQKVVKGNQKRLESLRELAGKENLEYPSVTLPPQPHTKEGVDAYNEVIARVRMWVNLNLWQKLKLSRDDAKPLLRLKGFPSFPLVERQANEVDWWDMVCNVKKLINEKKEDGKVFWQNLAGYKRQEALRPYLSSEEDRKKGKKFARYQLGDLLLHLEKKHGEDWGKVYDEAWERIDKKVEGLSKHIKLEEERRSEDAQSKAALTDWLRAKASFVIEGLKEADKDEFCRCELKLQKWYGDLRGKPFAIEAENSILDISGFSKQYNCAFIWQKDGVKKLNLYLIINYFKGGKLRFKKIKPEAFEANRFYTVINKKSGEIVPMEVNFNFDDPNLIILPLAFGKRQGREFIWNDLLSLETGSLKLANGRVIEKTLYNRRTRQDEPALFVALTFERREVLDSSNIKPMNLIGVDRGENIPAVIALTDPEGCPLSRFKDSLGNPTHILRIGESYKEKQRTIQAKKEVEQRRAGGYSRKYASKAKNLADDMVRNTARDLLYYAVTQDAMLIFENLSRGFGRQGKRTFMAERQYTRMEDWLTAKLAYEGLPSKTYLSKTLAQYTSKTCSNCGFTITSADYDRVLEKLKKTATGWMTTINGKELKVEGQITYYNRYKRQNVVKDLSVELDRLSEESVNNDISSWTKGRSGEALSLLKKRFSHRPVQEKFVCLNCGFETHADEQAALNIARSWLFLRSQEYKKYQTNKTTGNTDKRAFVETWQSFYRKKLKEVWKPAV

SEQ ID NO: 158 - protein, 978 aa, synthetic construct
QEIKRINKIRRRLVKDSNTKKAGKTGPMKTLLVRVMTPDLRERLENLRKKPENIPQPISNTSRANLNKLLTDYTEMKKAILHVYWEEFQKDPVGLMSRVAQPASKKIDQNKLKPEMDEKGNLTTAGFACSQCGQPLFVYKLEQVSEKGKAYTNYFGRCNVAEHEKLILLAQLKPEKDSDEAVTYSLGKFGQRALDFYSIHVTKESTHPVKPLAQIAGNRYASNPVGKALSDACMGTIASFLSKYQDIIIEHQKVVKGNQKRLESLRELAGKENLEYPSVTLPPQPHTKEGVDAYNEVIARVRMWVNLNLWQKLKLSRDDAKPLLRLKGFPSFPLVERQANEVDWWDMVCNVKKLINEKKEDGKVFWQNLAGYKRQEALRPYLSSEEDRKKGKKFARYQLGDLLLHLEKKHGEDWGKVYDEAWERIDKKVEGLSKHIKLEEERRSEDAQSKAALTDWLRAKASFVIEGLKEADKDEFCRCELKLQKWYGDLRGKPFAIEAENSILDISGFSKQYNCAFIWQKDGVKKLNLYLIINYFKGGKLRFKKIKPEAFEANRFYTVINKKSGEIVPMEVNFNFDDPNLIILPLAFGKRQGREFIWNDLLSLETGSLKLANGRVIEKTLYNRRTRQDEPALFVALTFERREVLDSSNIKPMNLIGVDRGENIPAVIALTDPEGCPLSRFKDSLGNPTHILRIGESYKEKQRTIQAKKEVEQRRAGGYSRKYASKAKNLADDMVRNTARDLLYYAVTQDAMLIFENLSRGFGRQGKRTFMAERQYTRMEDWLTAKLAYEGLPSKTYLSKTLAQYTSKTCSNCGFTITSADYDRVLEKLKKTATGWMTTINGKELKVEGQITYYNRYKRQNVVKDLSVELDRLSEESVNNDISSWTKGRSGEALSLLKKRFSHRPVQEKFVCLNCGFETHADEQAALNIARSWLFLRSQEYKKYQTNKTTGNTDKRAFVETWQSFYRKKLKEVWKPAV

SEQ ID NO: 159 - protein, 979 aa, synthetic construct
QEIKRINKIRRRLVKDSNTKKAGKTGPMKTLLVRVMTPDLRERLENLRKKPENIPQPISNTSRANLNKLLTDYTEMKKAILHVYWEEFQKDPVGLMSRVAQPASKKIDQNKLKPEMDEKGNLTTAGFACSQCGQPLFVYKLEQVSEKGKAYTNYFGRCNVAEHEKLILLAQLKPEKDSDEAVTYSLGKFGQRALDFYSIHVTKESTHPVKPLAQIAGNRYASGPVGKALSDACMGTIASFLSKYQDIIIEHQKVVKGNQKRLESLRELAGKENLEYPSVTLPPQPHTKEGVDAYNEVIARVRMWVNLNLWQKLKLSRDDAKPLLRLKGFPSFPLVERQANEVDWWDMVCNVKKLINEKKEDGKVFWQNLAGYKRQEALRPYLSSEEDRKKGKKFARYQLGDLLLHLEKKHGEDWGKVYDEAWERIDKKVEGLSKHIKLEEERRSEDAQSKAALTDWLRAKASFVIEGLKEADKDEFCRCELKLQKWYGDLRGKPFAIEAENSILDISGFSKQYNCAFIWQKDGVKKLNLYLIINYFKGWGKLRFKKIKPEAFEANRFYTVINKKSGEIVPMEVNFNFDDPNLIILPLAFGKRQGREFIWNDLLSLETGSLKLANGRVIEKTLYNRRTRQDEPALFVALTFERREVLDSSNIKPMNLIGVDRGENIPAVIALTDPEGCPLSRFKDSLGNPTHILRIGESYKEKQRTIQAKKEVEQRRAGGYSRKYASKAKNLADDMVRNTARDLLYYAVTQDAMLIFENLSRGFGRQGKRTFMAERQYTRMEDWLTAKLAYEGLPSKTYLSKTLAQYTSKTCSNCGFTITSADYDRVLEKLKKTATGWMTTINGKELKVEGQITYYNRYKRQNVVKDLSVELDRLSEESVNNDISSWTKGRSGEALSLLKKRFSHRPVQEKFVCLNCGFETHADEQAALNIARSWLFLRSQEYKKYQTNKTTGNTDKRAFVETWQSFYRKKLKEVWKPAV

SEQ ID NO: 160 - protein, 979 aa, synthetic construct
QEIKRINKIRRRLVKDSNTKKAGKTGPMKTLLVRVMTPDLRERLENLRKKPENIPQPISNTSRANLNKLLTDYTEMKKAILHVYWEEFQKDPVGLMSRVAQPASKKIDQNKLKPEMDEKGNLTTAGFACSQCGQPLFVYKLEQVSEKGKAYTNYFGRCNVAEHEKLILLAQLKPEKDSDEAVTYSLGKFGQRALDFYSIHVTKESTHPVKPLAQIAGNRYASGPVGKALSDACMGTIASFLSKYQDIIIEHQKVVKGNQKRLESLRELAGKENLEYPSVTLPPQPHTKEGVDAYNEVIARVRMWVNLNLWQKLKLSRDDAKPLLRLKGFPSFPLVERQANEVDWWDMVCNVKKLINEKKEDGKVFWQNLAGYKRQEALRPYLSSEEDRKKGKKFARYQLGDLLLHLEKKHGEDWGKVYDEAWERIDKKVEGLSKHIKLEEERRSEDAQSKAALTDWLRAKASFVIEGLKEADKDEFCRCELKLQKWYGDLRGKPFAIEAENSILDISGFSKQYNCAFIWQKDGVKKLNLYLIINYFKGYGKLRFKKIKPEAFEANRFYTVINKKSGEIVPMEVNFNFDDPNLIILPLAFGKRQGREFIWNDLLSLETGSLKLANGRVIEKTLYNRRTRQDEPALFVALTFERREVLDSSNIKPMNLIGVDRGENIPAVIALTDPEGCPLSRFKDSLGNPTHILRIGESYKEKQRTIQAKKEVEQRRAGGYSRKYASKAKNLADDMVRNTARDLLYYAVTQDAMLIFENLSRGFGRQGKRTFMAERQYTRMEDWLTAKLAYEGLPSKTYLSKTLAQYTSKTCSNCGFTITSADYDRVLEKLKKTATGWMTTINGKELKVEGQITYYNRYKRQNVVKDLSVELDRLSEESVNNDISSWTKGRSGEALSLLKKRFSHRPVQEKFVCLNCGFETHADEQAALNIARSWLFLRSQEYKKYQTNKTTGNTDKRAFVETWQSFYRKKLKEVWKPAV

SEQ ID NO: 161 - protein, 979 aa, synthetic construct
QEIKRINKIRRRLVKDSNTKKAGKTRGPMKTLLVRVMTPDLRERLENLRKKPENIPQPISNTSRANLNKLLTDYTEMKKAILHVYWEEFQKDPVGLMSRVAQPASKKIDQNKLKPEMDEKGNLTTAGFACSQCGQPLFVYKLEQVSEKGKAYTNYFGRCNVAEHEKLILLAQLKPEKDSDEAVTYSLGKFGQRALDFYSIHVTKESTHPVKPLAQIAGNRYASGPVGKALSDACMGTIASFLSKYQDIIIEHQKVVKGNQKRLESLRELAGKENLEYPSVTLPPQPHTKEGVDAYNEVIARVRMWVNLNLWQKLKLSRDDAKPLLRLKGFPSFPLVERQANEVDWWDMVCNVKKLINEKKEDGKVFWQNLAGYKRQEALRPYLSSEEDRKKGKKFARYQLGDLLLHLEKKHGEDWGKVYDEAWERIDKKVEGLSKHIKLEEERRSEDAQSKAALTDWLRAKASFVIEGLKEADKDEFCRCELKLQKWYGDLRGKPFAIEAENSILDISGFSKQYNCAFIWQKDGVKKLNLYLIINYFKGGKLRFKKIKPEAFEANRFYTVINKKSGEIVPMEVNFNFDDPNLIILPLAFGKRQGREFIWNDLLSLETGSLKLANGRVIEKTLYNRRTRQDEPALFVALTFERREVLDSSNIKPMNLIGVDRGENIPAVIALTDPEGCPLSRFKDSLGNPTHILRIGESYKEKQRTIQAKKEVEQRRAGGYSRKYASKAKNLADDMVRNTARDLLYYAVTQDAMLIFENLSRGFGRQGKRTFMAERQYTRMEDWLTAKLAYEGLPSKTYLSKTLAQYTSKTCSNCGFTITSADYDRVLEKLKKTATGWMTTINGKELKVEGQITYYNRYKRQNVVKDLSVELDRLSEESVNNDISSWTKGRSGEALSLLKKRFSHRPVQEKFVCLNCGFETHADEQAALNIARSWLFLRSQEYKKYQTNKTTGNTDKRAFVETWQSFYRKKLKEVWKPAV

SEQ ID NO: 162 - protein, 979 aa, synthetic construct
QEIKRINKIRRRLVKDSNTKKAGKTRGPMKTLLVRVMTPDLRERLENLRKKPENIPQPISNTSRANLNKLLTDYTEMKKAILHVYWEEFQKDPVGLMSRVAQPASKKIDQNKLKPEMDEKGNLTTAGFACSQCGQPLFVYKLEQVSEKGKAYTNYFGRCNVAEHEKLILLAQLKPEKDSDEAVTYSLGKFGQRALDFYSIHVTKESTHPVKPLAQIAGNRYASYPVGKALSDACMGTIASFLSKYQDIIIEHQKVVKGNQKRLESLRELAGKENLEYPSVTLPPQPHTKEGVDAYNEVIARVRMWVNLNLWQKLKLSRDDAKPLLRLKGFPSFPLVERQANEVDWWDMVCNVKKLINEKKEDGKVFWQNLAGYKRQEALRPYLSSEEDRKKGKKFARYQLGDLLLHLEKKHGEDWGKVYDEAWERIDKKVEGLSKHIKLEEERRSEDAQSKAALTDWLRAKASFVIEGLKEADKDEFCRCELKLQKWYGDLRGKPFAIEAENSILDISGFSKQYNCAFIWQKDGVKKLNLYLIINYFKGGKLRFKKIKPEAFEANRFYTVINKKSGEIVPMEVNFNFDDPNLIILPLAFGKRQGREFIWNDLLSLETGSLKLANGRVIEKTLYNRRTRQDEPALFVALTFERREVLDSSNIKPMNLIGVDRGENIPAVIALTDPEGCPLSRFKDSLGNPTHILRIGESYKEKQRTIQAKKEVEQRRAGGYSRKYASKAKNLADDMVRNTARDLLYYAVTQDAMLIFENLSRGFGRQGKRTFMAERQYTRMEDWLTAKLAYEGLPSKTYLSKTLAQYTSKTCSNCGFTITSADYDRVLEKLKKTATGWMTTINGKELKVEGQITYYNRYKRQNVVKDLSVELDRLSEESVNNDISSWTKGRSGEALSLLKKRFSHRPVQEKFVCLNCGFETHADEQAALNIARSWLFLRSQEYKKYQTNKTTGNTDKRAFVETWQSFYRKKLKEVWKPAV

SEQ ID NO: 163 - protein, 978 aa, synthetic construct
QEIKRINKIRRRLVKDSNTKKAGKTGPMKTLLVRVMTPDLRERLENLRKKPENIPQPISNTSRANLNKLLTDYTEMKKAILHVYWEEFQKDPVGLMSRVAQPASKKIDQNKLKPEMDEKGNLTTAGFACSQCGQPLFVYKLEQVSEKGKAYTNYFGRCNVAEHEKLILLAQLKPEKDSDEAVTYSLGKFGQRALDFYSIHVTKESTHPVKPLAQIAGNRYASHPVGKALSDACMGTIASFLSKYQDIIIEHQKVVKGNQKRLESLRELAGKENLEYPSVTLPPQPHTKEGVDAYNEVIARVRMWVNLNLWQKLKLSRDDAKPLLRLKGFPSFPLVERQANEVDWWDMVCNVKKLINEKKEDGKVFWQNLAGYKRQEALRPYLSSEEDRKKGKKFARYQLGDLLLHLEKKHGEDWGKVYDEAWERIDKKVEGLSKHIKLEEERRSEDAQSKAALTDWLRAKASFVIEGLKEADKDEFCRCELKLQKWYGDLRGKPFAIEAENSILDISGFSKQYNCAFIWQKDGVKKLNLYLIINYFKGGKLRFKKIKPEAFEANRFYTVINKKSGEIVPMEVNFNFDDPNLIILPLAFGKRQGREFIWNDLLSLETGSLKLANGRVIEKTLYNRRTRQDEPALFVALTFERREVLDSSNIKPMNLIGVDRGENIPAVIALTDPEGCPLSRFKDSLGNPTHILRIGESYKEKQRTIQAKKEVEQRRAGGYSRKYASKAKNLADDMVRNTARDLLYYAVTQDAMLIFENLSRGFGRQGKRTFMAERQYTRMEDWLTAKLAYEGLPSKTYLSKTLAQYTSKTCSNCGFTITSADYDRVLEKLKKTATGWMTTINGKELKVEGQITYYNRYKRQNVVKDLSVELDRLSEESVNNDISSWTKGRSGEALSLLKKRFSHRPVQEKFVCLNCGFETHADEQAALNIARSWLFLRSQEYKKYQTNKTTGNTDKRAFVETWQSFYRKKLKEVWKPAV

SEQ ID NO: 164 - protein, 978 aa, synthetic construct
QEIKRINKIRRRLVKDSNTKKAGKTGPMKTLLVRVMTPDLRERLENLRKKPENIPQPISNTSRANLNKLLTDYTEMKKAILHVYWEEFQKDPVGLMSRVAQPASKKIDQNKLKPEMDEKGNLTTAGFACSQCGQPLFVYKLEQVSEKGKAYTNYFGRCNVAEHEKLILLAQLKPEKDSDEAVTYSLGKFGQRALDFYSIHVTKESTHPVKPLAQIAGNRYASSPVGKALSDACMGTIASFLSKYQDIIIEHQKVVKGNQKRLESLRELAGKENLEYPSVTLPPQPHTKEGVDAYNEVIARVRMWVNLNLWQKLKLSRDDAKPLLRLKGFPSFPLVERQANEVDWWDMVCNVKKLINEKKEDGKVFWQNLAGYKRQEALRPYLSSEEDRKKGKKFARYQLGDLLLHLEKKHGEDWGKVYDEAWERIDKKVEGLSKHIKLEEERRSEDAQSKAALTDWLRAKASFVIEGLKEADKDEFCRCELKLQKWYGDLRGKPFAIEAENSILDISGFSKQYNCAFIWQKDGVKKLNLYLIINYFKGGKLRFKKIKPEAFEANRFYTVINKKSGEIVPMEVNFNFDDPNLIILPLAFGKRQGREFIWNDLLSLETGSLKLANGRVIEKTLYNRRTRQDEPALFVALTFERREVLDSSNIKPMNLIGVDRGENIPAVIALTDPEGCPLSRFKDSLGNPTHILRIGESYKEKQRTIQAKKEVEQRRAGGYSRKYASKAKNLADDMVRNTARDLLYYAVTQDAMLIFENLSRGFGRQGKRTFMAERQYTRMEDWLTAKLAYEGLPSKTYLSKTLAQYTSKTCSNCGFTITSADYDRVLEKLKKTATGWMTTINGKELKVEGQITYYNRYKRQNVVKDLSVELDRLSEESVNNDISSWTKGRSGEALSLLKKRFSHRPVQEKFVCLNCGFETHADEQAALNIARSWLFLRSQEYKKYQTNKTTGNTDKRAFVETWQSFYRKKLKEVWKPAV

SEQ ID NO: 165 - protein, 978 aa, synthetic construct
QEIKRINKIRRRLVKDSNTKKAGKTGPMKTLLVRVMTPDLRERLENLRKKPENIPQPISNTSRANLNKLLTDYTEMKKAILHVYWEEFQKDPVGLMSRVAQPASKKIDQNKLKPEMDEKGNLTTAGFACSQCGQPLFVYKLEQVSEKGKAYTNYFGRCNVAEHEKLILLAQLKPEKDSDEAVTYSLGKFGQRALDFYSIHVTKESTHPVKPLAQIAGNRYASTPVGKALSDACMGTIASFLSKYQDIIIEHQKVVKGNQKRLESLRELAGKENLEYPSVTLPPQPHTKEGVDAYNEVIARVRMWVNLNLWQKLKLSRDDAKPLLRLKGFPSFPLVERQANEVDWWDMVCNVKKLINEKKEDGKVFWQNLAGYKRQEALRPYLSSEEDRKKGKKFARYQLGDLLLHLEKKHGEDWGKVYDEAWERIDKKVEGLSKHIKLEEERRSEDAQSKAALTDWLRAKASFVIEGLKEADKDEFCRCELKLQKWYGDLRGKPFAIEAENSILDISGFSKQYNCAFIWQKDGVKKLNLYLIINYFKGGKLRFKKIKPEAFEANRFYTVINKKSGEIVPMEVNFNFDDPNLIILPLAFGKRQGREFIWNDLLSLETGSLKLANGRVIEKTLYNRRTRQDEPALFVALTFERREVLDSSNIKPMNLIGVDRGENIPAVIALTDPEGCPLSRFKDSLGNPTHILRIGESYKEKQRTIQAKKEVEQRRAGGYSRKYASKAKNLADDMVRNTARDLLYYAVTQDAMLIFENLSRGFGRQGKRTFMAERQYTRMEDWLTAKLAYEGLPSKTYLSKTLAQYTSKTCSNCGFTITSADYDRVLEKLKKTATGWMTTINGKELKVEGQITYYNRYKRQNVVKDLSVELDRLSEESVNNDISSWTKGRSGEALSLLKKRFSHRPVQEKFVCLNCGFETHADEQAALNIARSWLFLRSQEYKKYQTNKTTGNTDKRAFVETWQSFYRKKLKEVWKPAV

SEQ ID NO: 166 - protein, 978 aa, synthetic construct
QEIKRINKIRRRLVKDSNTKKAGKTGPMKTLLVRVMTPDLRERLENLRKKPENIPQPISNTSRANLNKLLTDYTEMKKAILHVYWEEFQKDPVGLMSRVAQPASKKIDQNKLKPEMDEKGNLTTAGFACSQCGQPLFVYKLEQVSEKGKAYTNYFGRCNVAEHEKLILLAQLKPEKDSDEAVTYSLGKFGQRALDFYSIHVTKESTHPVKPLAQIAGNRYASAPVGKALSDACMGTIASFLSKYQDIIIEHQKVVKGNQKRLESLRELAGKENLEYPSVTLPPQPHTKEGVDAYNEVIARVRMWVNLNLWQKLKLSRDDAKPLLRLKGFPSFPLVERQANEVDWWDMVCNVKKLINEKKEDGKVFWQNLAGYKRQEALRPYLSSEEDRKKGKKFARYQLGDLLLHLEKKHGEDWGKVYDEAWERIDKKVEGLSKHIKLEEERRSEDAQSKAALTDWLRAKASFVIEGLKEADKDEFCRCELKLQKWYGDLRGKPFAIEAENSILDISGFSKQYNCAFIWQKDGVKKLNLYLIINYFKGGKLRFKKIKPEAFEANRFYTVINKKSGEIVPMEVNFNFDDPNLIILPLAFGKRQGREFIWNDLLSLETGSLKLANGRVIEKTLYNRRTRQDEPALFVALTFERREVLDSSNIKPMNLIGVDRGENIPAVIALTDPEGCPLSRFKDSLGNPTHILRIGESYKEKQRTIQAKKEVEQRRAGGYSRKYASKAKNLADDMVRNTARDLLYYAVTQDAMLIFENLSRGFGRQGKRTFMAERQYTRMEDWLTAKLAYEGLPSKTYLSKTLAQYTSKTCSNCGFTITSADYDRVLEKLKKTATGWMTTINGKELKVEGQITYYNRYKRQNVVKDLSVELDRLSEESVNNDISSWTKGRSGEALSLLKKRFSHRPVQEKFVCLNCGFETHADEQAALNIARSWLFLRSQEYKKYQTNKTTGNTDKRAFVETWQSFYRKKLKEVWKPAV

SEQ ID NO: 167 - protein, 978 aa, synthetic construct
QEIKRINKIRRRLVKDSNTKKAGKTGPMKTLLVRVMTPDLRERLENLRKKPENIPQPISNTSRANLNKLLTDYTEMKKAILHVYWEEFQKDPVGLMSRVAQPASKKIDQNKLKPEMDEKGNLTTAGFACSQCGQPLFVYKLEQVSEKGKAYTNYFGRCNVAEHEKLILLAQLKPEKDSDEAVTYSLGKFGQRALDFYSIHVTKESTHPVKPLAQIAGNRYASVPVGKALSDACMGTIASFLSKYQDIIIEHQKVVKGNQKRLESLRELAGKENLEYPSVTLPPQPHTKEGVDAYNEVIARVRMWVNLNLWQKLKLSRDDAKPLLRLKGFPSFPLVERQANEVDWWDMVCNVKKLINEKKEDGKVFWQNLAGYKRQEALRPYLSSEEDRKKGKKFARYQLGDLLLHLEKKHGEDWGKVYDEAWERIDKKVEGLSKHIKLEEERRSEDAQSKAALTDWLRAKASFVIEGLKEADKDEFCRCELKLQKWYGDLRGKPFAIEAENSILDISGFSKQYNCAFIWQKDGVKKLNLYLIINYFKGGKLRFKKIKPEAFEANRFYTVINKKSGEIVPMEVNFNFDDPNLIILPLAFGKRQGREFIWNDLLSLETGSLKLANGRVIEKTLYNRRTRQDEPALFVALTFERREVLDSSNIKPMNLIGVDRGENIPAVIALTDPEGCPLSRFKDSLGNPTHILRIGESYKEKQRTIQAKKEVEQRRAGGYSRKYASKAKNLADDMVRNTARDLLYYAVTQDAMLIFENLSRGFGRQGKRTFMAERQYTRMEDWLTAKLAYEGLPSKTYLSKTLAQYTSKTCSNCGFTITSADYDRVLEKLKKTATGWMTTINGKELKVEGQITYYNRYKRQNVVKDLSVELDRLSEESVNNDISSWTKGRSGEALSLLKKRFSHRPVQEKFVCLNCGFETHADEQAALNIARSWLFLRSQEYKKYQTNKTTGNTDKRAFVETWQSFYRKKLKEVWKPAV

SEQ ID NO: 168 - protein, 978 aa, synthetic construct
QEIKRINKIRRRLVKDSNTKKAGKTGPMKTLLVRVMTPDLRERLENLRKKPENIPQPISNTSRANLNKLLTDYTEMKKAILHVYWEEFQKDPVGLMSRVAQPASKKIDQNKLKPEMDEKGNLTTAGFACSQCGQPLFVYKLEQVSEKGKAYTNYFGRCNVAEHEKLILLAQLKPEKDSDEAVTYSLGKFGQRALDFYSIHVTKESTHPVKPLAQIAGNRYASGPVGKALSLACMGTIASFLSKYQDIIIEHQKVVKGNQKRLESLRELAGKENLEYPSVTLPPQPHTKEGVDAYNEVIARVRMWVNLNLWQKLKLSRDDAKPLLRLKGFPSFPLVERQANEVDWWDMVCNVKKLINEKKEDGKVFWQNLAGYKRQEALRPYLSSEEDRKKGKKFARYQLGDLLLHLEKKHGEDWGKVYDEAWERIDKKVEGLSKHIKLEEERRSEDAQSKAALTDWLRAKASFVIEGLKEADKDEFCRCELKLQKWYGDLRGKPFAIEAENSILDISGFSKQYNCAFIWQKDGVKKLNLYLIINYFKGGKLRFKKIKPEAFEANRFYTVINKKSGEIVPMEVNFNFDDPNLIILPLAFGKRQGREFIWNDLLSLETGSLKLANGRVIEKTLYNRRTRQDEPALFVALTFERREVLDSSNIKPMNLIGVDRGENIPAVIALTDPEGCPLSRFKDSLGNPTHILRIGESYKEKQRTIQAKKEVEQRRAGGYSRKYASKAKNLADDMVRNTARDLLYYAVTQDAMLIFENLSRGFGRQGKRTFMAERQYTRMEDWLTAKLAYEGLPSKTYLSKTLAQYTSKTCSNCGFTITSADYDRVLEKLKKTATGWMTTINGKELKVEGQITYYNRYKRQNVVKDLSVELDRLSEESVNNDISSWTKGRSGEALSLLKKRFSHRPVQEKFVCLNCGFETHADEQAALNIARSWLFLRSQEYKKYQTNKTTGNTDKRAFVETWQSFYRKKLKEVWKPAV

SEQ ID NO: 169 - protein, 978 aa, synthetic construct
QEIKRINKIRRRLVKDSNTKKAGKTGPMKTLLVRVMTPDLRERLENLRKKPENIPQPISNTSRANLNKLLTDYTEMKKAILHVYWEEFQKDPVGLMSRVAQPASKKIDQNKLKPEMDEKGNLTTAGFACSQCGQPLFVYKLEQVSEKGKAYTNYFGRCNVAEHEKLILLAQLKPEKDSDEAVTYSLGKFGQRALDFYSIHVTKESTHPVKPLAQIAGNRYASGPVGKALSNACMGTIASFLSKYQDIIIEHQKVVKGNQKRLESLRELAGKENLEYPSVTLPPQPHTKEGVDAYNEVIARVRMWVNLNLWQKLKLSRDDAKPLLRLKGFPSFPLVERQANEVDWWDMVCNVKKLINEKKEDGKVFWQNLAGYKRQEALRPYLSSEEDRKKGKKFARYQLGDLLLHLEKKHGEDWGKVYDEAWERIDKKVEGLSKHIKLEEERRSEDAQSKAALTDWLRAKASFVIEGLKEADKDEFCRCELKLQKWYGDLRGKPFAIEAENSILDISGFSKQYNCAFIWQKDGVKKLNLYLIINYFKGGKLRFKKIKPEAFEANRFYTVINKKSGEIVPMEVNFNFDDPNLIILPLAFGKRQGREFIWNDLLSLETGSLKLANGRVIEKTLYNRRTRQDEPALFVALTFERREVLDSSNIKPMNLIGVDRGENIPAVIALTDPEGCPLSRFKDSLGNPTHILRIGESYKEKQRTIQAKKEVEQRRAGGYSRKYASKAKNLADDMVRNTARDLLYYAVTQDAMLIFENLSRGFGRQGKRTFMAERQYTRMEDWLTAKLAYEGLPSKTYLSKTLAQYTSKTCSNCGFTITSADYDRVLEKLKKTATGWMTTINGKELKVEGQITYYNRYKRQNVVKDLSVELDRLSEESVNNDISSWTKGRSGEALSLLKKRFSHRPVQEKFVCLNCGFETHADEQAALNIARSWLFLRSQEYKKYQTNKTTGNTDKRAFVETWQSFYRKKLKEVWKPAV

SEQ ID NO: 170 - protein, 978 aa, synthetic construct
QEIKRINKIRRRLVKDSNTKKAGKTGPMKTLLVRVMTPDLRERLENLRKKPENIPQPISNTSRANLNKLLTDYTEMKKAILHVYWEEFQKDPVGLMSRVAQPASKKIDQNKLKPEMDEKGNLTTAGFACSQCGQPLFVYKLEQVSEKGKAYTNYFGRCNVAEHEKLILLAQLKPEKDSDEAVTYSLGKFGQRALDFYSIHVTKESTHPVKPLAQIAGNRYASGPVGKALSQACMGTIASFLSKYQDIIIEHQKVVKGNQKRLESLRELAGKENLEYPSVTLPPQPHTKEGVDAYNEVIARVRMWVNLNLWQKLKLSRDDAKPLLRLKGFPSFPLVERQANEVDWWDMVCNVKKLINEKKEDGKVFWQNLAGYKRQEALRPYLSSEEDRKKGKKFARYQLGDLLLHLEKKHGEDWGKVYDEAWERIDKKVEGLSKHIKLEEERRSEDAQSKAALTDWLRAKASFVIEGLKEADKDEFCRCELKLQKWYGDLRGKPFAIEAENSILDISGFSKQYNCAFIWQKDGVKKLNLYLIINYFKGGKLRFKKIKPEAFEANRFYTVINKKSGEIVPMEVNFNFDDPNLIILPLAFGKRQGREFIWNDLLSLETGSLKLANGRVIEKTLYNRRTRQDEPALFVALTFERREVLDSSNIKPMNLIGVDRGENIPAVIALTDPEGCPLSRFKDSLGNPTHILRIGESYKEKQRTIQAKKEVEQRRAGGYSRKYASKAKNLADDMVRNTARDLLYYAVTQDAMLIFENLSRGFGRQGKRTFMAERQYTRMEDWLTAKLAYEGLPSKTYLSKTLAQYTSKTCSNCGFTITSADYDRVLEKLKKTATGWMTTINGKELKVEGQITYYNRYKRQNVVKDLSVELDRLSEESVNNDISSWTKGRSGEALSLLKKRFSHRPVQEKFVCLNCGFETHADEQAALNIARSWLFLRSQEYKKYQTNKTTGNTDKRAFVETWQSFYRKKLKEVWKPAV

SEQ ID NO: 171 - protein, 978 aa, synthetic construct
QEIKRINKIRRRLVKDSNTKKAGKTGPMKTLLVRVMTPDLRERLENLRKKPENIPQPISNTSRANLNKLLTDYTEMKKAILHVYWEEFQKDPVGLMSRVAQPASKKIDQNKLKPEMDEKGNLTTAGFACSQCGQPLFVYKLEQVSEKGKAYTNYFGRCNVAEHEKLILLAQLKPEKDSDEAVTYSLGKFGQRALDFYSIHVTKESTHPVKPLAQIAGNRYASGPVGKALSSACMGTIASFLSKYQDIIIEHQKVVKGNQKRLESLRELAGKENLEYPSVTLPPQPHTKEGVDAYNEVIARVRMWVNLNLWQKLKLSRDDAKPLLRLKGFPSFPLVERQANEVDWWDMVCNVKKLINEKKEDGKVFWQNLAGYKRQEALRPYLSSEEDRKKGKKFARYQLGDLLLHLEKKHGEDWGKVYDEAWERIDKKVEGLSKHIKLEEERRSEDAQSKAALTDWLRAKASFVIEGLKEADKDEFCRCELKLQKWYGDLRGKPFAIEAENSILDISGFSKQYNCAFIWQKDGVKKLNLYLIINYFKGGKLRFKKIKPEAFEANRFYTVINKKSGEIVPMEVNFNFDDPNLIILPLAFGKRQGREFIWNDLLSLETGSLKLANGRVIEKTLYNRRTRQDEPALFVALTFERREVLDSSNIKPMNLIGVDRGENIPAVIALTDPEGCPLSRFKDSLGNPTHILRIGESYKEKQRTIQAKKEVEQRRAGGYSRKYASKAKNLADDMVRNTARDLLYYAVTQDAMLIFENLSRGFGRQGKRTFMAERQYTRMEDWLTAKLAYEGLPSKTYLSKTLAQYTSKTCSNCGFTITSADYDRVLEKLKKTATGWMTTINGKELKVEGQITYYNRYKRQNVVKDLSVELDRLSEESVNNDISSWTKGRSGEALSLLKKRFSHRPVQEKFVCLNCGFETHADEQAALNIARSWLFLRSQEYKKYQTNKTTGNTDKRAFVETWQSFYRKKLKEVWKPAV

SEQ ID NO: 172 - protein, 978 aa, synthetic construct
QEIKRINKIRRRLVKDSNTKKAGKTGPMKTLLVRVMTPDLRERLENLRKKPENIPQPISNTSRANLNKLLTDYTEMKKAILHVYWEEFQKDPVGLMSRVAQPASKKIDQNKLKPEMDEKGNLTTAGFACSQCGQPLFVYKLEQVSEKGKAYTNYFGRCNVAEHEKLILLAQLKPEKDSDEAVTYSLGKFGQRALDFYSIHVTKESTHPVKPLAQIAGNRYASGPVGKALSAACMGTIASFLSKYQDIIIEHQKVVKGNQKRLESLRELAGKENLEYPSVTLPPQPHTKEGVDAYNEVIARVRMWVNLNLWQKLKLSRDDAKPLLRLKGFPSFPLVERQANEVDWWDMVCNVKKLINEKKEDGKVFWQNLAGYKRQEALRPYLSSEEDRKKGKKFARYQLGDLLLHLEKKHGEDWGKVYDEAWERIDKKVEGLSKHIKLEEERRSEDAQSKAALTDWLRAKASFVIEGLKEADKDEFCRCELKLQKWYGDLRGKPFAIEAENSILDISGFSKQYNCAFIWQKDGVKKLNLYLIINYFKGGKLRFKKIKPEAFEANRFYTVINKKSGEIVPMEVNFNFDDPNLIILPLAFGKRQGREFIWNDLLSLETGSLKLANGRVIEKTLYNRRTRQDEPALFVALTFERREVLDSSNIKPMNLIGVDRGENIPAVIALTDPEGCPLSRFKDSLGNPTHILRIGESYKEKQRTIQAKKEVEQRRAGGYSRKYASKAKNLADDMVRNTARDLLYYAVTQDAMLIFENLSRGFGRQGKRTFMAERQYTRMEDWLTAKLAYEGLPSKTYLSKTLAQYTSKTCSNCGFTITSADYDRVLEKLKKTATGWMTTINGKELKVEGQITYYNRYKRQNVVKDLSVELDRLSEESVNNDISSWTKGRSGEALSLLKKRFSHRPVQEKFVCLNCGFETHADEQAALNIARSWLFLRSQEYKKYQTNKTTGNTDKRAFVETWQSFYRKKLKEVWKPAV

SEQ ID NO: 173 - protein, 978 aa, synthetic construct
QEIKRINKIRRRLVKDSNTKKAGKTGPMKTLLVRVMTPDLRERLENLRKKPENIPQPISNTSRANLNKLLTDYTEMKKAILHVYWEEFQKDPVGLMSRVAQPASKKIDQNKLKPEMDEKGNLTTAGFACSQCGQPLFVYKLEQVSEKGKAYTNYFGRCNVAEHEKLILLAQLKPEKDSDEAVTYSLGKFGQRALDFYSIHVTKESTHPVKPLAQIAGNRYASGPVGKALSGACMGTIASFLSKYQDIIIEHQKVVKGNQKRLESLRELAGKENLEYPSVTLPPQPHTKEGVDAYNEVIARVRMWVNLNLWQKLKLSRDDAKPLLRLKGFPSFPLVERQANEVDWWDMVCNVKKLINEKKEDGKVFWQNLAGYKRQEALRPYLSSEEDRKKGKKFARYQLGDLLLHLEKKHGEDWGKVYDEAWERIDKKVEGLSKHIKLEEERRSEDAQSKAALTDWLRAKASFVIEGLKEADKDEFCRCELKLQKWYGDLRGKPFAIEAENSILDISGFSKQYNCAFIWQKDGVKKLNLYLIINYFKGGKLRFKKIKPEAFEANRFYTVINKKSGEIVPMEVNFNFDDPNLIILPLAFGKRQGREFIWNDLLSLETGSLKLANGRVIEKTLYNRRTRQDEPALFVALTFERREVLDSSNIKPMNLIGVDRGENIPAVIALTDPEGCPLSRFKDSLGNPTHILRIGESYKEKQRTIQAKKEVEQRRAGGYSRKYASKAKNLADDMVRNTARDLLYYAVTQDAMLIFENLSRGFGRQGKRTFMAERQYTRMEDWLTAKLAYEGLPSKTYLSKTLAQYTSKTCSNCGFTITSADYDRVLEKLKKTATGWMTTINGKELKVEGQITYYNRYKRQNVVKDLSVELDRLSEESVNNDISSWTKGRSGEALSLLKKRFSHRPVQEKFVCLNCGFETHADEQAALNIARSWLFLRSQEYKKYQTNKTTGNTDKRAFVETWQSFYRKKLKEVWKPAV

SEQ ID NO: 174 - protein, 978 aa, synthetic construct
QEIKRINKIRRRLVKDSNTKKAGKTGPMKTLLVRVMTPDLRERLENLRKKPENIPQPISNTSRANLNKLLTDYTEMKKAILHVYWEEFQKDPVGLMSRVAQPASKKIDQNKLKPEMDEKGNLTTAGFACSQCGQPLFVYKLEQVSEKGKAYTNYFGRCNVAEHEKLILLAQLKPEKDSDEAVTYSLGKFGQRALDFYSIHVTKESTHPVKPLAQIAGNRYASGPVGKALSTACMGTIASFLSKYQDIIIEHQKVVKGNQKRLESLRELAGKENLEYPSVTLPPQPHTKEGVDAYNEVIARVRMWVNLNLWQKLKLSRDDAKPLLRLKGFPSFPLVERQANEVDWWDMVCNVKKLINEKKEDGKVFWQNLAGYKRQEALRPYLSSEEDRKKGKKFARYQLGDLLLHLEKKHGEDWGKVYDEAWERIDKKVEGLSKHIKLEEERRSEDAQSKAALTDWLRAKASFVIEGLKEADKDEFCRCELKLQKWYGDLRGKPFAIEAENSILDISGFSKQYNCAFIWQKDGVKKLNLYLIINYFKGGKLRFKKIKPEAFEANRFYTVINKKSGEIVPMEVNFNFDDPNLIILPLAFGKRQGREFIWNDLLSLETGSLKLANGRVIEKTLYNRRTRQDEPALFVALTFERREVLDSSNIKPMNLIGVDRGENIPAVIALTDPEGCPLSRFKDSLGNPTHILRIGESYKEKQRTIQAKKEVEQRRAGGYSRKYASKAKNLADDMVRNTARDLLYYAVTQDAMLIFENLSRGFGRQGKRTFMAERQYTRMEDWLTAKLAYEGLPSKTYLSKTLAQYTSKTCSNCGFTITSADYDRVLEKLKKTATGWMTTINGKELKVEGQITYYNRYKRQNVVKDLSVELDRLSEESVNNDISSWTKGRSGEALSLLKKRFSHRPVQEKFVCLNCGFETHADEQAALNIARSWLFLRSQEYKKYQTNKTTGNTDKRAFVETWQSFYRKKLKEVWKPAV

SEQ ID NO: 175 - protein, 978 aa, synthetic construct
QEIKRINKIRRRLVKDSNTKKAGKRGPMKTLLVRVMTPDLRERLENLRKKPENIPQPISNTSRANLNKLLTDYTEMKKAILHVYWEEFQKDPVGLMSRVAQPASKKIDQNKLKPEMDEKGNLTTAGFACSQCGQPLFVYKLEQVSEKGKAYTNYFGRCNVAEHEKLILLAQLKPEKDSDEAVTYSLGKFGQRALDFYSIHVTKESTHPVKPLAQIAGNRYASGPVGKALSDACMGTIASFLSKYQDIIIEHQKVVKGNQKRLESLRELAGKENLEYPSVTLPPQPHTKEGVDAYNEVIARVRMWVNLNLWQKLKLSRDDAKPLLRLKGFPSFPLVERQANEVDWWDMVCNVKKLINEKKEDGKVFWQNLAGYKRQEALRPYLSSEEDRKKGKKFARYQLGDLLLHLEKKHGEDWGKVYDEAWERIDKKVEGLSKHIKLEEERRSEDAQSKAALTDWLRAKASFVIEGLKEADKDEFCRCELKLQKWYGDLRGKPFAIEAENSILDISGFSKQYNCAFIWQKDGVKKLNLYLIINYFKGGKLRFKKIKPEAFEANRFYTVINKKSGEIVPMEVNFNFDDPNLIILPLAFGKRQGREFIWNDLLSLETGSLKLANGRVIEKTLYNRRTRQDEPALFVALTFERREVLDSSNIKPMNLIGVDRGENIPAVIALTDPEGCPLSRFKDSLGNPTHILRIGESYKEKQRTIQAKKEVEQRRAGGYSRKYASKAKNLADDMVRNTARDLLYYAVTQDAMLIFENLSRGFGRQGKRTFMAERQYTRMEDWLTAKLAYEGLPSKTYLSKTLAQYTSKTCSNCGFTITSADYDRVLEKLKKTATGWMTTINGKELKVEGQITYYNRYKRQNVVKDLSVELDRLSEESVNNDISSWTKGRSGEALSLLKKRFSHRPVQEKFVCLNCGFETHADEQAALNIARSWLFLRSQEYKKYQTNKTTGNTDKRAFVETWQSFYRKKLKEVWKPAV

SEQ ID NO: 176 - protein, 978 aa, synthetic construct
QEIKRINKIRRRLVKDSNTKKAGKTGPMKTLLVRVMTPDLRERLENLRKKPENIPQPISNTSRANLNKLLTDYTEMKKAILHVYWEEFQKDPVGLMSRVAQPASKKIDQNKLKPEMDEKGNLTTAGFACSQCGQPLFVYKLEQVSEKGKAYTNYFGRCNVAEHEKLILLAQLKPEKDSDEAVTYSLGKFGQRALDFYSIHVTKESTHPVKPLAQIAGNRYASGPVGKALSDACMGTIASFLSKYQDIIIEHQKVVKGNQKRLESLRELAGKENLEYPSVTLPPQPHTKEGVDAYNEVIARVRMWVNLNLWQKLKLSRDDAKPLLRLKGFPSFPLVERQANEVDWWDMVCNVKKLINEKKEDGKVFWQNLAGYKRQEALRPYLSSEEDRKKGKKFARYQLHDLLLHLEKKHGEDWGKVYDEAWERIDKKVEGLSKHIKLEEERRSEDAQSKAALTDWLRAKASFVIEGLKEADKDEFCRCELKLQKWYGDLRGKPFAIEAENSILDISGFSKQYNCAFIWQKDGVKKLNLYLIINYFKGGKLRFKKIKPEAFEANRFYTVINKKSGEIVPMEVNFNFDDPNLIILPLAFGKRQGREFIWNDLLSLETGSLKLANGRVIEKTLYNRRTRQDEPALFVALTFERREVLDSSNIKPMNLIGVDRGENIPAVIALTDPEGCPLSRFKDSLGNPTHILRIGESYKEKQRTIQAKKEVEQRRAGGYSRKYASKAKNLADDMVRNTARDLLYYAVTQDAMLIFENLSRGFGRQGKRTFMAERQYTRMEDWLTAKLAYEGLPSKTYLSKTLAQYTSKTCSNCGFTITSADYDRVLEKLKKTATGWMTTINGKELKVEGQITYYNRYKRQNVVKDLSVELDRLSEESVNNDISSWTKGRSGEALSLLKKRFSHRPVQEKFVCLNCGFETHADEQAALNIARSWLFLRSQEYKKYQTNKTTGNTDKRAFVETWQSFYRKKLKEVWKPAV

SEQ ID NO: 177 - protein, 979 aa, synthetic construct
QEIKRINKIRRRLVKDSNTKKAGKTGPMKTLLVRVMTPDLRERLENLRKKPENIPQPISNTSRANLNKLLTDYTEMKKAILHVYWEEFQKDPVGLMSRVAQPASKKIDQNKLKPEMDEKEGNLTTAGFACSQCGQPLFVYKLEQVSEKGKAYTNYFGRCNVAEHEKLILLAQLKPEKDSDEAVTYSLGKFGQRALDFYSIHVTKESTHPVKPLAQIAGNRYASGPVGKALSDACMGTIASFLSKYQDIIIEHQKVVKGNQKRLESLRELAGKENLEYPSVTLPPQPHTKEGVDAYNEVIARVRMWVNLNLWQKLKLSRDDAKPLLRLKGFPSFPLVERQANEVDWWDMVCNVKKLINEKKEDGKVFWQNLAGYKRQEALRPYLSSEEDRKKGKKFARYQLGDLLLHLEKKHGEDWGKVYDEAWERIDKKVEGLSKHIKLEEERRSEDAQSKAALTDWLRAKASFVIEGLKEADKDEFCRCELKLQKWYGDLRGKPFAIEAENSILDISGFSKQYNCAFIWQKDGVKKLNLYLIINYFKGGKLRFKKIKPEAFEANRFYTVINKKSGEIVPMEVNFNFDDPNLIILPLAFGKRQGREFIWNDLLSLETGSLKLANGRVIEKTLYNRRTRQDEPALFVALTFERREVLDSSNIKPMNLIGVDRGENIPAVIALTDPEGCPLSRFKDSLGNPTHILRIGESYKEKQRTIQAKKEVEQRRAGGYSRKYASKAKNLADDMVRNTARDLLYYAVTQDAMLIFENLSRGFGRQGKRTFMAERQYTRMEDWLTAKLAYEGLPSKTYLSKTLAQYTSKTCSNCGFTITSADYDRVLEKLKKTATGWMTTINGKELKVEGQITYYNRYKRQNVVKDLSVELDRLSEESVNNDISSWTKGRSGEALSLLKKRFSHRPVQEKFVCLNCGFETHADEQAALNIARSWLFLRSQEYKKYQTNKTTGNTDKRAFVETWQSFYRKKLKEVWKPAV

SEQ ID NO: 178 - protein, 978 aa, synthetic construct
QEIKRINKIRRRLVKDSNTKKAGKTGPMKTLLVRVMTPDLRERLENLRKKPENIPQPISNTSRANLNKLLTDYTEMKKAILHVYWEEFQKDPVGLMSRVAQPASKKIDQNKLKPEMDEKGNLTTAGFACSQCGQPLFVYKLEQVSEKGKAYTNYFGRCNVAEHEKLILLAQLKPEKDSDEAVTYSLGKFGQRALDFYSIHVTKESTHPVKPLAQIAGNRYASGPVGKALSDACMGTIASFLSKYQDIIIEHQKVVKGNQKRLESLRELAGKENLEYPSVTLPPQPHTKEGVDAYNEVIARVRMWVNINLWQKLKLSRDDAKPLLRLKGFPSFPLVERQANEVDWWDMVCNVKKLINEKKEDGKVFWQNLAGYKRQEALRPYLSSEEDRKKGKKFARYQLGDLLLHLEKKHGEDWGKVYDEAWERIDKKVEGLSKHIKLEEERRSEDAQSKAALTDWLRAKASFVIEGLKEADKDEFCRCELKLQKWYGDLRGKPFAIEAENSILDISGFSKQYNCAFIWQKDGVKKLNLYLIINYFKGGKLRFKKIKPEAFEANRFYTVINKKSGEIVPMEVNFNFDDPNLIILPLAFGKRQGREFIWNDLLSLETGSLKLANGRVIEKTLYNRRTRQDEPALFVALTFERREVLDSSNIKPMNLIGVDRGENIPAVIALTDPEGCPLSRFKDSLGNPTHILRIGESYKEKQRTIQAKKEVEQRRAGGYSRKYASKAKNLADDMVRNTARDLLYYAVTQDAMLIFENLSRGFGRQGKRTFMAERQYTRMEDWLTAKLAYEGLPSKTYLSKTLAQYTSKTCSNCGFTITSADYDRVLEKLKKTATGWMTTINGKELKVEGQITYYNRYKRQNVVKDLSVELDRLSEESVNNDISSWTKGRSGEALSLLKKRFSHRPVQEKFVCLNCGFETHADEQAALNIARSWLFLRSQEYKKYQTNKTTGNTDKRAFVETWQSFYRKKLKEVWKPAV

SEQ ID NO: 179 - protein, 979 aa, synthetic construct
QEIKRINKIRRRLVKDSNTKKAGKTGPMKTLLVRVMTPDLRERLENLRKKPENIPQPISNTSRANLNKLLTDYTEMKKAILHVYWEEFQKDPVGLMSRVAQPASKKIDQNKLKPEMDEKGNLTTAGFACSQCGQPLFVYKLEQVSEKGKAYTNYFGRCNVAEHEKLILLAQLKPEKDSDEAVTYSLGKFGQRALDFYSIHVTKESTHPVKPLAQIAGNRYASGPVGKALSDACMGTIASFLSKYQDIIIEHQKVVKGNQKRLESLRELAGKENLEYPSVTLPPQPHTKEGVDAYNEVIARVRMWVNLNLWQKLKLSRDDAKPLLRLKGFPSFPLVERQANEVDWWDMVCNVKKLINEKKEDGKVFWQNLAGYKRQEALRPYLFSSEEDRKKGKKFARYQLGDLLLHLEKKHGEDWGKVYDEAWERIDKKVEGLSKHIKLEEERRSEDAQSKAALTDWLRAKASFVIEGLKEADKDEFCRCELKLQKWYGDLRGKPFAIEAENSILDISGFSKQYNCAFIWQKDGVKKLNLYLIINYFKGGKLRFKKIKPEAFEANRFYTVINKKSGEIVPMEVNFNFDDPNLIILPLAFGKRQGREFIWNDLLSLETGSLKLANGRVIEKTLYNRRTRQDEPALFVALTFERREVLDSSNIKPMNLIGVDRGENIPAVIALTDPEGCPLSRFKDSLGNPTHILRIGESYKEKQRTIQAKKEVEQRRAGGYSRKYASKAKNLADDMVRNTARDLLYYAVTQDAMLIFENLSRGFGRQGKRTFMAERQYTRMEDWLTAKLAYEGLPSKTYLSKTLAQYTSKTCSNCGFTITSADYDRVLEKLKKTATGWMTTINGKELKVEGQITYYNRYKRQNVVKDLSVELDRLSEESVNNDISSWTKGRSGEALSLLKKRFSHRPVQEKFVCLNCGFETHADEQAALNIARSWLFLRSQEYKKYQTNKTTGNTDKRAFVETWQSFYRKKLKEVWKPAV

SEQ ID NO: 180 - protein, 979 aa, synthetic construct
QEIKRINKIRRRLVKDSNTKKAGKTGPMKTLLVRVMTPDLRERLENLRKKPENIPQPISNTSRANLNKLLTDYTEMKKAILHVYWEEFQKDPVGLMSRVAQPASKKIDQNKLKPEMDEKGNLTTAGFACSQCGQPLFVYKWLEQVSEKGKAYTNYFGRCNVAEHEKLILLAQLKPEKDSDEAVTYSLGKFGQRALDFYSIHVTKESTHPVKPLAQIAGNRYASGPVGKALSDACMGTIASFLSKYQDIIIEHQKVVKGNQKRLESLRELAGKENLEYPSVTLPPQPHTKEGVDAYNEVIARVRMWVNLNLWQKLKLSRDDAKPLLRLKGFPSFPLVERQANEVDWWDMVCNVKKLINEKKEDGKVFWQNLAGYKRQEALRPYLSSEEDRKKGKKFARYQLGDLLLHLEKKHGEDWGKVYDEAWERIDKKVEGLSKHIKLEEERRSEDAQSKAALTDWLRAKASFVIEGLKEADKDEFCRCELKLQKWYGDLRGKPFAIEAENSILDISGFSKQYNCAFIWQKDGVKKLNLYLIINYFKGGKLRFKKIKPEAFEANRFYTVINKKSGEIVPMEVNFNFDDPNLIILPLAFGKRQGREFIWNDLLSLETGSLKLANGRVIEKTLYNRRTRQDEPALFVALTFERREVLDSSNIKPMNLIGVDRGENIPAVIALTDPEGCPLSRFKDSLGNPTHILRIGESYKEKQRTIQAKKEVEQRRAGGYSRKYASKAKNLADDMVRNTARDLLYYAVTQDAMLIFENLSRGFGRQGKRTFMAERQYTRMEDWLTAKLAYEGLPSKTYLSKTLAQYTSKTCSNCGFTITSADYDRVLEKLKKTATGWMTTINGKELKVEGQITYYNRYKRQNVVKDLSVELDRLSEESVNNDISSWTKGRSGEALSLLKKRFSHRPVQEKFVCLNCGFETHADEQAALNIARSWLFLRSQEYKKYQTNKTTGNTDKRAFVETWQSFYRKKLKEVWKPAV

SEQ ID NO: 181 - protein, 978 aa, synthetic construct
QEIKRINKIRRRLVKDSNTKKAGKTGPMKTLLVRVMTPDLRERLENLRKKPENIPQPISNTSRANLNKLLTDYTEMKKAILHVYWEEFQKDPVGLMSRVAQPASKKIDQNKLKPEMDEKGNLTTAGFACSQCGQPLFVYKLEQVSEKGKAYTNYFGRCNVAEHEKLILLAQLKPEKDSDEAVTYSLGKFGQRALDFYSIHVTKESTHPVKPLAQIAGNRYASGPVGKALSDACMGTIASFLSKYQDIIIEHQKVVKGNQKRLESLRELAGKENLEYPSVTLPPQPHTKEGVDAYNEVIARVRMWVNDNLWQKLKLSRDDAKPLLRLKGFPSFPLVERQANEVDWWDMVCNVKKLINEKKEDGKVFWQNLAGYKRQEALRPYLSSEEDRKKGKKFARYQLGDLLLHLEKKHGEDWGKVYDEAWERIDKKVEGLSKHIKLEEERRSEDAQSKAALTDWLRAKASFVIEGLKEADKDEFCRCELKLQKWYGDLRGKPFAIEAENSILDISGFSKQYNCAFIWQKDGVKKLNLYLIINYFKGGKLRFKKIKPEAFEANRFYTVINKKSGEIVPMEVNFNFDDPNLIILPLAFGKRQGREFIWNDLLSLETGSLKLANGRVIEKTLYNRRTRQDEPALFVALTFERREVLDSSNIKPMNLIGVDRGENIPAVIALTDPEGCPLSRFKDSLGNPTHILRIGESYKEKQRTIQAKKEVEQRRAGGYSRKYASKAKNLADDMVRNTARDLLYYAVTQDAMLIFENLSRGFGRQGKRTFMAERQYTRMEDWLTAKLAYEGLPSKTYLSKTLAQYTSKTCSNCGFTITSADYDRVLEKLKKTATGWMTTINGKELKVEGQITYYNRYKRQNVVKDLSVELDRLSEESVNNDISSWTKGRSGEALSLLKKRFSHRPVQEKFVCLNCGFETHADEQAALNIARSWLFLRSQEYKKYQTNKTTGNTDKRAFVETWQSFYRKKLKEVWKPAV

SEQ ID NO: 182 - protein, 978 aa, synthetic construct
QEIKRINKIRRRLVKDSNTKKAGKTGPMKTLLVRVMTPDLRERLENLRKKPENIPQPISNTSRANLNKLLTDYTEMKKAILHVYWEEFQKDPVGLMSRVAQPASKKIDQNKLKPEMDEKGNLTTAGFACSQCGQPLFVYKLEQVSEKGKAYTNYFGRCNVAEHEKLILLAQLKPEKDSDEAVTYSLGKFGQRALDFYSIHVTKESTHPVKPLAQIAGNRYASGPVGKALSDACMGTIASFLSKYQDIIIEHQKVVKGNQKRLESLRELAGKENLEYPSVTLPPQPHTKEGVDAYNEVIARVRMWVNLNLWQKLKLSRDDAKPLLRLKGFPSFPLVERQANEVDWWDMVCNVKKLINEKKEDGKVFWQNLAGYKRQEALRPYLSSEEDRKKGKKFARYQLGDLLLHLEKKHGEDWGKVYDEAWERIDKKVEGLSKHIKLEEERRSEDAQSKAALTDWLRAKASFVIEGLKEADKDEFCRCELKLQKWYGDLRGKPFAIEAENSILDISGFSTQYNCAFIWQKDGVKKLNLYLIINYFKGGKLRFKKIKPEAFEANRFYTVINKKSGEIVPMEVNFNFDDPNLIILPLAFGKRQGREFIWNDLLSLETGSLKLANGRVIEKTLYNRRTRQDEPALFVALTFERREVLDSSNIKPMNLIGVDRGENIPAVIALTDPEGCPLSRFKDSLGNPTHILRIGESYKEKQRTIQAKKEVEQRRAGGYSRKYASKAKNLADDMVRNTARDLLYYAVTQDAMLIFENLSRGFGRQGKRTFMAERQYTRMEDWLTAKLAYEGLPSKTYLSKTLAQYTSKTCSNCGFTITSADYDRVLEKLKKTATGWMTTINGKELKVEGQITYYNRYKRQNVVKDLSVELDRLSEESVNNDISSWTKGRSGEALSLLKKRFSHRPVQEKFVCLNCGFETHADEQAALNIARSWLFLRSQEYKKYQTNKTTGNTDKRAFVETWQSFYRKKLKEVWKPAV

SEQ ID NO: 183 - protein, 978 aa, synthetic construct
QEIKRINKIRRRLVKDSNTKKAGKTGPMKTLLVRVMTPDLRERLENLRKKPENIPQPISNTSRANLNKLLTDYTEMKKAILHVYWEEFQKDPVGLMSRVAQPASKKIDQNKLKPEMDEKGNLTTAGFACSQCGQPLFVYKLEQVSEKGKAYTNYFGRCNVAEHEKLILLDQLKPEKDSDEAVTYSLGKFGQRALDFYSIHVTKESTHPVKPLAQIAGNRYASGPVGKALSDACMGTIASFLSKYQDIIIEHQKVVKGNQKRLESLRELAGKENLEYPSVTLPPQPHTKEGVDAYNEVIARVRMWVNLNLWQKLKLSRDDAKPLLRLKGFPSFPLVERQANEVDWWDMVCNVKKLINEKKEDGKVFWQNLAGYKRQEALRPYLSSEEDRKKGKKFARYQLGDLLLHLEKKHGEDWGKVYDEAWERIDKKVEGLSKHIKLEEERRSEDAQSKAALTDWLRAKASFVIEGLKEADKDEFCRCELKLQKWYGDLRGKPFAIEAENSILDISGFSKQYNCAFIWQKDGVKKLNLYLIINYFKGGKLRFKKIKPEAFEANRFYTVINKKSGEIVPMEVNFNFDDPNLIILPLAFGKRQGREFIWNDLLSLETGSLKLANGRVIEKTLYNRRTRQDEPALFVALTFERREVLDSSNIKPMNLIGVDRGENIPAVIALTDPEGCPLSRFKDSLGNPTHILRIGESYKEKQRTIQAKKEVEQRRAGGYSRKYASKAKNLADDMVRNTARDLLYYAVTQDAMLIFENLSRGFGRQGKRTFMAERQYTRMEDWLTAKLAYEGLPSKTYLSKTLAQYTSKTCSNCGFTITSADYDRVLEKLKKTATGWMTTINGKELKVEGQITYYNRYKRQNVVKDLSVELDRLSEESVNNDISSWTKGRSGEALSLLKKRFSHRPVQEKFVCLNCGFETHADEQAALNIARSWLFLRSQEYKKYQTNKTTGNTDKRAFVETWQSFYRKKLKEVWKPAV

SEQ ID NO: 184 - protein, 978 aa, synthetic construct
QEIKRINKIRRRLVKDSNTKKAGKTGPMKTLLVRVMTPDLRERLENLRKKPENIPQPISNTSRANLNKLLTDYTEMKKAILHVYWEEFQKDPVGLMSRVAQPASKKIDQNKLKPEMDEKGNLTTAGFACSQCGQPLFVYKLEQVSEKGKAYTNYFGRCNVAEHEKLIPLAQLKPEKDSDEAVTYSLGKFGQRALDFYSIHVTKESTHPVKPLAQIAGNRYASGPVGKALSDACMGTIASFLSKYQDIIIEHQKVVKGNQKRLESLRELAGKENLEYPSVTLPPQPHTKEGVDAYNEVIARVRMWVNLNLWQKLKLSRDDAKPLLRLKGFPSFPLVERQANEVDWWDMVCNVKKLINEKKEDGKVFWQNLAGYKRQEALRPYLSSEEDRKKGKKFARYQLGDLLLHLEKKHGEDWGKVYDEAWERIDKKVEGLSKHIKLEEERRSEDAQSKAALTDWLRAKASFVIEGLKEADKDEFCRCELKLQKWYGDLRGKPFAIEAENSILDISGFSKQYNCAFIWQKDGVKKLNLYLIINYFKGGKLRFKKIKPEAFEANRFYTVINKKSGEIVPMEVNFNFDDPNLIILPLAFGKRQGREFIWNDLLSLETGSLKLANGRVIEKTLYNRRTRQDEPALFVALTFERREVLDSSNIKPMNLIGVDRGENIPAVIALTDPEGCPLSRFKDSLGNPTHILRIGESYKEKQRTIQAKKEVEQRRAGGYSRKYASKAKNLADDMVRNTARDLLYYAVTQDAMLIFENLSRGFGRQGKRTFMAERQYTRMEDWLTAKLAYEGLPSKTYLSKTLAQYTSKTCSNCGFTITSADYDRVLEKLKKTATGWMTTINGKELKVEGQITYYNRYKRQNVVKDLSVELDRLSEESVNNDISSWTKGRSGEALSLLKKRFSHRPVQEKFVCLNCGFETHADEQAALNIARSWLFLRSQEYKKYQTNKTTGNTDKRAFVETWQSFYRKKLKEVWKPAV

SEQ ID NO: 185 - protein, 978 aa, synthetic construct
QEIKRINKIRRRLVKDSNTKKAGKTGPMKTLLVRVMTPDLRERLENLRKKPENIPQPISNTSRANLNKLLTDYTEMKKAILHVYWEEFQKDPVGLMSRVAQPASKKIDQNKLKPEMDEKGNLTTAGFACSQCGQPLFVYKLEQVSEKGKAYTNYFGRCNVAEHEKLILLAQLKPEKDSDEAVTYSLGKFGQRALDFYSIHVTKESTHPVKPLAQIAGNRYASGPVGKALSDACMGTIASFLSKYQDIIIEHQKVVKGNQKRLESLRELAGKENLEYPSVTLPPQPHTKEGVDAYNEVIARVRMWVNLNLWQKLKLSRDDAKPLLRLKGFPSFPLVERQANEVDWWDMVCNVKKLINEKKEDGKVFWQNLAGYKRQEALRPYLSSEEDRKKGKKFARYQLGDLLLHLEKKHGEDWGKVYDEAWERIDKKVEGLSKHIKLEEERRSEDAQSKAALTDWLRAKASFVIEGLKEADKDEFCRCELKLQKWYGDLRGKPFAIEAENSILDISGFSKQYNCAFIWQKDGVKKLNLYLIINYFKGGKLRFKKIKPEAFEANRFYTVINKKSGEIVPMEVNFNFDDPNLIILPLAFGKRQGREFIWNDLLSLETGSLKLANGRVIEKTLYNRRTRQDEPALFVALTFERREVLDSSNIKPMNLIGVDRGENIPAVIALTDPEGCPLSRFKDSLGNPTHILRIGESYKEKQRTIQAKKEVEQRRAGGYSRKYASKAKNLADDMVRNTARDLLYYAVTQDAMLIFENLSRGFGRQGKRTFMAERQYTRMEDWLTAKKAYEGLPSKTYLSKTLAQYTSKTCSNCGFTITSADYDRVLEKLKKTATGWMTTINGKELKVEGQITYYNRYKRQNVVKDLSVELDRLSEESVNNDISSWTKGRSGEALSLLKKRFSHRPVQEKFVCLNCGFETHADEQAALNIARSWLFLRSQEYKKYQTNKTTGNTDKRAFVETWQSFYRKKLKEVWKPAV

SEQ ID NO: 186 - protein, 978 aa, synthetic construct
QEIKRINKIRRRLVKDSNTKKAGKTGPMKTLLVRVMTPDLRERLENLRKKPENIPQPISNTSRANLNKLLTDYTEMKKAILHVYWEEFQKDPVGLMSRVAQPASKKIDQNKLKPEMDEKGNLTTAGFACSQCGQPLFVYKLEQVSEKGKAYTNYFGRCNVAEHEKLILLAQLKPEKDSDEAVTYSLGKFGQRALDFYSIHVTKESTHPVKPLAQIAGNRYASGPVGKALSDACMGTIASFLSKYQDIIIEHQKVVKGNQKRLESLRELAGKENLEYPSVTLPPQPHTKEGVDAYNEVIARVRMWVNLNLWQKLKLSRDDAKPLLRLKGFPSFPLVERQANEVDWWDMVCNVKKLINEKKEDGKVFWQNLAGYKRQEALRPYLSSEEDRKKGKKFARYQLGDLLLHLEKKHGEDWGKVYDEAWERIDKKVEGLSKHIKLEEERRSEDAQSKAALTDWLRAKASFVIEGLKEADKDEFCRCELKLQKWYGDLRGKPFAIEAENSILDISGFSKQYNCAFIWQKDGVKKLNLYLIINYFKGGKLRFKKIKPEAFEANRFYTVINKKSGEIVPMEVNFNFDDPNLIILPLAFGKRQGREFIWNDLLSLETGSLKLANGRVIEKTLYNRRTRQDEPALFVALTFERREVLDSSNIKPMNLIGVDRGENIPAVIALTDPEGCPLSRFKDSLGNPTHILRIGESYKEKQRTIQAKKEVEQRRAGGYSRKYASKAKNLADDMVRNTARDLLYYAVTQDAMLIFENLSRGFGRQGKRTFMAERQYTRMEDWLTAKLKYEGLPSKTYLSKTLAQYTSKTCSNCGFTITSADYDRVLEKLKKTATGWMTTINGKELKVEGQITYYNRYKRQNVVKDLSVELDRLSEESVNNDISSWTKGRSGEALSLLKKRFSHRPVQEKFVCLNCGFETHADEQAALNIARSWLFLRSQEYKKYQTNKTTGNTDKRAFVETWQSFYRKKLKEVWKPAV

SEQ ID NO: 187 - protein, 978 aa, synthetic construct
QEGKRINKIRRRLVKDSNTKKAGKTGPMKTLLVRVMTPDLRERLENLRKKPENIPQPISNTSRANLNKLLTDYTEMKKAILHVYWEEFQKDPVGLMSRVAQPASKKIDQNKLKPEMDEKGNLTTAGFACSQCGQPLFVYKLEQVSEKGKAYTNYFGRCNVAEHEKLILLAQLKPEKDSDEAVTYSLGKFGQRALDFYSIHVTKESTHPVKPLAQIAGNRYASGPVGKALSDACMGTIASFLSKYQDIIIEHQKVVKGNQKRLESLRELAGKENLEYPSVTLPPQPHTKEGVDAYNEVIARVRMWVNLNLWQKLKLSRDDAKPLLRLKGFPSFPLVERQANEVDWWDMVCNVKKLINEKKEDGKVFWQNLAGYKRQEALRPYLSSEEDRKKGKKFARYQLGDLLLHLEKKHGEDWGKVYDEAWERIDKKVEGLSKHIKLEEERRSEDAQSKAALTDWLRAKASFVIEGLKEADKDEFCRCELKLQKWYGDLRGKPFAIEAENSILDISGFSKQYNCAFIWQKDGVKKLNLYLIINYFKGGKLRFKKIKPEAFEANRFYTVINKKSGEIVPMEVNFNFDDPNLIILPLAFGKRQGREFIWNDLLSLETGSLKLANGRVIEKTLYNRRTRQDEPALFVALTFERREVLDSSNIKPMNLIGVDRGENIPAVIALTDPEGCPLSRFKDSLGNPTHILRIGESYKEKQRTIQAKKEVEQRRAGGYSRKYASKAKNLADDMVRNTARDLLYYAVTQDAMLIFENLSRGFGRQGKRTFMAERQYTRMEDWLTAKLAYEGLPSKTYLSKTLAQYTSKTCSNCGFTITSADYDRVLEKLKKTATGWMTTINGKELKVEGQITYYNRYKRQNVVKDLSVELDRLSEESVNNDISSWTKGRSGEALSLLKKRFSHRPVQEKFVCLNCGFETHADEQAALNIARSWLFLRSQEYKKYQTNKTTGNTDKRAFVETWQSFYRKKLKEVWKPAV

SEQ ID NO: 188 - protein, 978 aa, synthetic construct
QEEKRINKIRRRLVKDSNTKKAGKTGPMKTLLVRVMTPDLRERLENLRKKPENIPQPISNTSRANLNKLLTDYTEMKKAILHVYWEEFQKDPVGLMSRVAQPASKKIDQNKLKPEMDEKGNLTTAGFACSQCGQPLFVYKLEQVSEKGKAYTNYFGRCNVAEHEKLILLAQLKPEKDSDEAVTYSLGKFGQRALDFYSIHVTKESTHPVKPLAQIAGNRYASGPVGKALSDACMGTIASFLSKYQDIIIEHQKVVKGNQKRLESLRELAGKENLEYPSVTLPPQPHTKEGVDAYNEVIARVRMWVNLNLWQKLKLSRDDAKPLLRLKGFPSFPLVERQANEVDWWDMVCNVKKLINEKKEDGKVFWQNLAGYKRQEALRPYLSSEEDRKKGKKFARYQLGDLLLHLEKKHGEDWGKVYDEAWERIDKKVEGLSKHIKLEEERRSEDAQSKAALTDWLRAKASFVIEGLKEADKDEFCRCELKLQKWYGDLRGKPFAIEAENSILDISGFSKQYNCAFIWQKDGVKKLNLYLIINYFKGGKLRFKKIKPEAFEANRFYTVINKKSGEIVPMEVNFNFDDPNLIILPLAFGKRQGREFIWNDLLSLETGSLKLANGRVIEKTLYNRRTRQDEPALFVALTFERREVLDSSNIKPMNLIGVDRGENIPAVIALTDPEGCPLSRFKDSLGNPTHILRIGESYKEKQRTIQAKKEVEQRRAGGYSRKYASKAKNLADDMVRNTARDLLYYAVTQDAMLIFENLSRGFGRQGKRTFMAERQYTRMEDWLTAKLAYEGLPSKTYLSKTLAQYTSKTCSNCGFTITSADYDRVLEKLKKTATGWMTTINGKELKVEGQITYYNRYKRQNVVKDLSVELDRLSEESVNNDISSWTKGRSGEALSLLKKRFSHRPVQEKFVCLNCGFETHADEQAALNIARSWLFLRSQEYKKYQTNKTTGNTDKRAFVETWQSFYRKKLKEVWKPAV

SEQ ID NO: 189 - protein, 979 aa, synthetic construct
QEIGKRINKIRRRLVKDSNTKKAGKTGPMKTLLVRVMTPDLRERLENLRKKPENIPQPISNTSRANLNKLLTDYTEMKKAILHVYWEEFQKDPVGLMSRVAQPASKKIDQNKLKPEMDEKGNLTTAGFACSQCGQPLFVYKLEQVSEKGKAYTNYFGRCNVAEHEKLILLAQLKPEKDSDEAVTYSLGKFGQRALDFYSIHVTKESTHPVKPLAQIAGNRYASGPVGKALSDACMGTIASFLSKYQDIIIEHQKVVKGNQKRLESLRELAGKENLEYPSVTLPPQPHTKEGVDAYNEVIARVRMWVNLNLWQKLKLSRDDAKPLLRLKGFPSFPLVERQANEVDWWDMVCNVKKLINEKKEDGKVFWQNLAGYKRQEALRPYLSSEEDRKKGKKFARYQLGDLLLHLEKKHGEDWGKVYDEAWERIDKKVEGLSKHIKLEEERRSEDAQSKAALTDWLRAKASFVIEGLKEADKDEFCRCELKLQKWYGDLRGKPFAIEAENSILDISGFSKQYNCAFIWQKDGVKKLNLYLIINYFKGGKLRFKKIKPEAFEANRFYTVINKKSGEIVPMEVNFNFDDPNLIILPLAFGKRQGREFIWNDLLSLETGSLKLANGRVIEKTLYNRRTRQDEPALFVALTFERREVLDSSNIKPMNLIGVDRGENIPAVIALTDPEGCPLSRFKDSLGNPTHILRIGESYKEKQRTIQAKKEVEQRRAGGYSRKYASKAKNLADDMVRNTARDLLYYAVTQDAMLIFENLSRGFGRQGKRTFMAERQYTRMEDWLTAKLAYEGLPSKTYLSKTLAQYTSKTCSNCGFTITSADYDRVLEKLKKTATGWMTTINGKELKVEGQITYYNRYKRQNVVKDLSVELDRLSEESVNNDISSWTKGRSGEALSLLKKRFSHRPVQEKFVCLNCGFETHADEQAALNIARSWLFLRSQEYKKYQTNKTTGNTDKRAFVETWQSFYRKKLKEVWKPAV

SEQ ID NO: 190 - protein, 978 aa, synthetic construct
QEIGRINKIRRRLVKDSNTKKAGKTGPMKTLLVRVMTPDLRERLENLRKKPENIPQPISNTSRANLNKLLTDYTEMKKAILHVYWEEFQKDPVGLMSRVAQPASKKIDQNKLKPEMDEKGNLTTAGFACSQCGQPLFVYKLEQVSEKGKAYTNYFGRCNVAEHEKLILLAQLKPEKDSDEAVTYSLGKFGQRALDFYSIHVTKESTHPVKPLAQIAGNRYASGPVGKALSDACMGTIASFLSKYQDIIIEHQKVVKGNQKRLESLRELAGKENLEYPSVTLPPQPHTKEGVDAYNEVIARVRMWVNLNLWQKLKLSRDDAKPLLRLKGFPSFPLVERQANEVDWWDMVCNVKKLINEKKEDGKVFWQNLAGYKRQEALRPYLSSEEDRKKGKKFARYQLGDLLLHLEKKHGEDWGKVYDEAWERIDKKVEGLSKHIKLEEERRSEDAQSKAALTDWLRAKASFVIEGLKEADKDEFCRCELKLQKWYGDLRGKPFAIEAENSILDISGFSKQYNCAFIWQKDGVKKLNLYLIINYFKGGKLRFKKIKPEAFEANRFYTVINKKSGEIVPMEVNFNFDDPNLIILPLAFGKRQGREFIWNDLLSLETGSLKLANGRVIEKTLYNRRTRQDEPALFVALTFERREVLDSSNIKPMNLIGVDRGENIPAVIALTDPEGCPLSRFKDSLGNPTHILRIGESYKEKQRTIQAKKEVEQRRAGGYSRKYASKAKNLADDMVRNTARDLLYYAVTQDAMLIFENLSRGFGRQGKRTFMAERQYTRMEDWLTAKLAYEGLPSKTYLSKTLAQYTSKTCSNCGFTITSADYDRVLEKLKKTATGWMTTINGKELKVEGQITYYNRYKRQNVVKDLSVELDRLSEESVNNDISSWTKGRSGEALSLLKKRFSHRPVQEKFVCLNCGFETHADEQAALNIARSWLFLRSQEYKKYQTNKTTGNTDKRAFVETWQSFYRKKLKEVWKPAV

SEQ ID NO: 191 - protein, 978 aa, synthetic construct
QEISRINKIRRRLVKDSNTKKAGKTGPMKTLLVRVMTPDLRERLENLRKKPENIPQPISNTSRANLNKLLTDYTEMKKAILHVYWEEFQKDPVGLMSRVAQPASKKIDQNKLKPEMDEKGNLTTAGFACSQCGQPLFVYKLEQVSEKGKAYTNYFGRCNVAEHEKLILLAQLKPEKDSDEAVTYSLGKFGQRALDFYSIHVTKESTHPVKPLAQIAGNRYASGPVGKALSDACMGTIASFLSKYQDIIIEHQKVVKGNQKRLESLRELAGKENLEYPSVTLPPQPHTKEGVDAYNEVIARVRMWVNLNLWQKLKLSRDDAKPLLRLKGFPSFPLVERQANEVDWWDMVCNVKKLINEKKEDGKVFWQNLAGYKRQEALRPYLSSEEDRKKGKKFARYQLGDLLLHLEKKHGEDWGKVYDEAWERIDKKVEGLSKHIKLEEERRSEDAQSKAALTDWLRAKASFVIEGLKEADKDEFCRCELKLQKWYGDLRGKPFAIEAENSILDISGFSKQYNCAFIWQKDGVKKLNLYLIINYFKGGKLRFKKIKPEAFEANRFYTVINKKSGEIVPMEVNFNFDDPNLIILPLAFGKRQGREFIWNDLLSLETGSLKLANGRVIEKTLYNRRTRQDEPALFVALTFERREVLDSSNIKPMNLIGVDRGENIPAVIALTDPEGCPLSRFKDSLGNPTHILRIGESYKEKQRTIQAKKEVEQRRAGGYSRKYASKAKNLADDMVRNTARDLLYYAVTQDAMLIFENLSRGFGRQGKRTFMAERQYTRMEDWLTAKLAYEGLPSKTYLSKTLAQYTSKTCSNCGFTITSADYDRVLEKLKKTATGWMTTINGKELKVEGQITYYNRYKRQNVVKDLSVELDRLSEESVNNDISSWTKGRSGEALSLLKKRFSHRPVQEKFVCLNCGFETHADEQAALNIARSWLFLRSQEYKKYQTNKTTGNTDKRAFVETWQSFYRKKLKEVWKPAV

SEQ ID NO: 192 - protein, 979 aa, synthetic construct
QEIKGRINKIRRRLVKDSNTKKAGKTGPMKTLLVRVMTPDLRERLENLRKKPENIPQPISNTSRANLNKLLTDYTEMKKAILHVYWEEFQKDPVGLMSRVAQPASKKIDQNKLKPEMDEKGNLTTAGFACSQCGQPLFVYKLEQVSEKGKAYTNYFGRCNVAEHEKLILLAQLKPEKDSDEAVTYSLGKFGQRALDFYSIHVTKESTHPVKPLAQIAGNRYASGPVGKALSDACMGTIASFLSKYQDIIIEHQKVVKGNQKRLESLRELAGKENLEYPSVTLPPQPHTKEGVDAYNEVIARVRMWVNLNLWQKLKLSRDDAKPLLRLKGFPSFPLVERQANEVDWWDMVCNVKKLINEKKEDGKVFWQNLAGYKRQEALRPYLSSEEDRKKGKKFARYQLGDLLLHLEKKHGEDWGKVYDEAWERIDKKVEGLSKHIKLEEERRSEDAQSKAALTDWLRAKASFVIEGLKEADKDEFCRCELKLQKWYGDLRGKPFAIEAENSILDISGFSKQYNCAFIWQKDGVKKLNLYLIINYFKGGKLRFKKIKPEAFEANRFYTVINKKSGEIVPMEVNFNFDDPNLIILPLAFGKRQGREFIWNDLLSLETGSLKLANGRVIEKTLYNRRTRQDEPALFVALTFERREVLDSSNIKPMNLIGVDRGENIPAVIALTDPEGCPLSRFKDSLGNPTHILRIGESYKEKQRTIQAKKEVEQRRAGGYSRKYASKAKNLADDMVRNTARDLLYYAVTQDAMLIFENLSRGFGRQGKRTFMAERQYTRMEDWLTAKLAYEGLPSKTYLSKTLAQYTSKTCSNCGFTITSADYDRVLEKLKKTATGWMTTINGKELKVEGQITYYNRYKRQNVVKDLSVELDRLSEESVNNDISSWTKGRSGEALSLLKKRFSHRPVQEKFVCLNCGFETHADEQAALNIARSWLFLRSQEYKKYQTNKTTGNTDKRAFVETWQSFYRKKLKEVWKPAV

SEQ ID NO: 193 - protein, 978 aa, synthetic construct
QEIKSINKIRRRLVKDSNTKKAGKTGPMKTLLVRVMTPDLRERLENLRKKPENIPQPISNTSRANLNKLLTDYTEMKKAILHVYWEEFQKDPVGLMSRVAQPASKKIDQNKLKPEMDEKGNLTTAGFACSQCGQPLFVYKLEQVSEKGKAYTNYFGRCNVAEHEKLILLAQLKPEKDSDEAVTYSLGKFGQRALDFYSIHVTKESTHPVKPLAQIAGNRYASGPVGKALSDACMGTIASFLSKYQDIIIEHQKVVKGNQKRLESLRELAGKENLEYPSVTLPPQPHTKEGVDAYNEVIARVRMWVNLNLWQKLKLSRDDAKPLLRLKGFPSFPLVERQANEVDWWDMVCNVKKLINEKKEDGKVFWQNLAGYKRQEALRPYLSSEEDRKKGKKFARYQLGDLLLHLEKKHGEDWGKVYDEAWERIDKKVEGLSKHIKLEEERRSEDAQSKAALTDWLRAKASFVIEGLKEADKDEFCRCELKLQKWYGDLRGKPFAIEAENSILDISGFSKQYNCAFIWQKDGVKKLNLYLIINYFKGGKLRFKKIKPEAFEANRFYTVINKKSGEIVPMEVNFNFDDPNLIILPLAFGKRQGREFIWNDLLSLETGSLKLANGRVIEKTLYNRRTRQDEPALFVALTFERREVLDSSNIKPMNLIGVDRGENIPAVIALTDPEGCPLSRFKDSLGNPTHILRIGESYKEKQRTIQAKKEVEQRRAGGYSRKYASKAKNLADDMVRNTARDLLYYAVTQDAMLIFENLSRGFGRQGKRTFMAERQYTRMEDWLTAKLAYEGLPSKTYLSKTLAQYTSKTCSNCGFTITSADYDRVLEKLKKTATGWMTTINGKELKVEGQITYYNRYKRQNVVKDLSVELDRLSEESVNNDISSWTKGRSGEALSLLKKRFSHRPVQEKFVCLNCGFETHADEQAALNIARSWLFLRSQEYKKYQTNKTTGNTDKRAFVETWQSFYRKKLKEVWKPAV

SEQ ID NO: 194 - protein, 978 aa, synthetic construct
QEIKRANKIRRRLVKDSNTKKAGKTGPMKTLLVRVMTPDLRERLENLRKKPENIPQPISNTSRANLNKLLTDYTEMKKAILHVYWEEFQKDPVGLMSRVAQPASKKIDQNKLKPEMDEKGNLTTAGFACSQCGQPLFVYKLEQVSEKGKAYTNYFGRCNVAEHEKLILLAQLKPEKDSDEAVTYSLGKFGQRALDFYSIHVTKESTHPVKPLAQIAGNRYASGPVGKALSDACMGTIASFLSKYQDIIIEHQKVVKGNQKRLESLRELAGKENLEYPSVTLPPQPHTKEGVDAYNEVIARVRMWVNLNLWQKLKLSRDDAKPLLRLKGFPSFPLVERQANEVDWWDMVCNVKKLINEKKEDGKVFWQNLAGYKRQEALRPYLSSEEDRKKGKKFARYQLGDLLLHLEKKHGEDWGKVYDEAWERIDKKVEGLSKHIKLEEERRSEDAQSKAALTDWLRAKASFVIEGLKEADKDEFCRCELKLQKWYGDLRGKPFAIEAENSILDISGFSKQYNCAFIWQKDGVKKLNLYLIINYFKGGKLRFKKIKPEAFEANRFYTVINKKSGEIVPMEVNFNFDDPNLIILPLAFGKRQGREFIWNDLLSLETGSLKLANGRVIEKTLYNRRTRQDEPALFVALTFERREVLDSSNIKPMNLIGVDRGENIPAVIALTDPEGCPLSRFKDSLGNPTHILRIGESYKEKQRTIQAKKEVEQRRAGGYSRKYASKAKNLADDMVRNTARDLLYYAVTQDAMLIFENLSRGFGRQGKRTFMAERQYTRMEDWLTAKLAYEGLPSKTYLSKTLAQYTSKTCSNCGFTITSADYDRVLEKLKKTATGWMTTINGKELKVEGQITYYNRYKRQNVVKDLSVELDRLSEESVNNDISSWTKGRSGEALSLLKKRFSHRPVQEKFVCLNCGFETHADEQAALNIARSWLFLRSQEYKKYQTNKTTGNTDKRAFVETWQSFYRKKLKEVWKPAV

SEQ ID NO: 195 - protein, 979 aa, synthetic construct
QEIKRGINKIRRRLVKDSNTKKAGKTGPMKTLLVRVMTPDLRERLENLRKKPENIPQPISNTSRANLNKLLTDYTEMKKAILHVYWEEFQKDPVGLMSRVAQPASKKIDQNKLKPEMDEKGNLTTAGFACSQCGQPLFVYKLEQVSEKGKAYTNYFGRCNVAEHEKLILLAQLKPEKDSDEAVTYSLGKFGQRALDFYSIHVTKESTHPVKPLAQIAGNRYASGPVGKALSDACMGTIASFLSKYQDIIIEHQKVVKGNQKRLESLRELAGKENLEYPSVTLPPQPHTKEGVDAYNEVIARVRMWVNLNLWQKLKLSRDDAKPLLRLKGFPSFPLVERQANEVDWWDMVCNVKKLINEKKEDGKVFWQNLAGYKRQEALRPYLSSEEDRKKGKKFARYQLGDLLLHLEKKHGEDWGKVYDEAWERIDKKVEGLSKHIKLEEERRSEDAQSKAALTDWLRAKASFVIEGLKEADKDEFCRCELKLQKWYGDLRGKPFAIEAENSILDISGFSKQYNCAFIWQKDGVKKLNLYLIINYFKGGKLRFKKIKPEAFEANRFYTVINKKSGEIVPMEVNFNFDDPNLIILPLAFGKRQGREFIWNDLLSLETGSLKLANGRVIEKTLYNRRTRQDEPALFVALTFERREVLDSSNIKPMNLIGVDRGENIPAVIALTDPEGCPLSRFKDSLGNPTHILRIGESYKEKQRTIQAKKEVEQRRAGGYSRKYASKAKNLADDMVRNTARDLLYYAVTQDAMLIFENLSRGFGRQGKRTFMAERQYTRMEDWLTAKLAYEGLPSKTYLSKTLAQYTSKTCSNCGFTITSADYDRVLEKLKKTATGWMTTINGKELKVEGQITYYNRYKRQNVVKDLSVELDRLSEESVNNDISSWTKGRSGEALSLLKKRFSHRPVQEKFVCLNCGFETHADEQAALNIARSWLFLRSQEYKKYQTNKTTGNTDKRAFVETWQSFYRKKLKEVWKPAV

SEQ ID NO: 196 - protein, 978 aa, synthetic construct
QEIKRISKIRRRLVKDSNTKKAGKTGPMKTLLVRVMTPDLRERLENLRKKPENIPQPISNTSRANLNKLLTDYTEMKKAILHVYWEEFQKDPVGLMSRVAQPASKKIDQNKLKPEMDEKGNLTTAGFACSQCGQPLFVYKLEQVSEKGKAYTNYFGRCNVAEHEKLILLAQLKPEKDSDEAVTYSLGKFGQRALDFYSIHVTKESTHPVKPLAQIAGNRYASGPVGKALSDACMGTIASFLSKYQDIIIEHQKVVKGNQKRLESLRELAGKENLEYPSVTLPPQPHTKEGVDAYNEVIARVRMWVNLNLWQKLKLSRDDAKPLLRLKGFPSFPLVERQANEVDWWDMVCNVKKLINEKKEDGKVFWQNLAGYKRQEALRPYLSSEEDRKKGKKFARYQLGDLLLHLEKKHGEDWGKVYDEAWERIDKKVEGLSKHIKLEEERRSEDAQSKAALTDWLRAKASFVIEGLKEADKDEFCRCELKLQKWYGDLRGKPFAIEAENSILDISGFSKQYNCAFIWQKDGVKKLNLYLIINYFKGGKLRFKKIKPEAFEANRFYTVINKKSGEIVPMEVNFNFDDPNLIILPLAFGKRQGREFIWNDLLSLETGSLKLANGRVIEKTLYNRRTRQDEPALFVALTFERREVLDSSNIKPMNLIGVDRGENIPAVIALTDPEGCPLSRFKDSLGNPTHILRIGESYKEKQRTIQAKKEVEQRRAGGYSRKYASKAKNLADDMVRNTARDLLYYAVTQDAMLIFENLSRGFGRQGKRTFMAERQYTRMEDWLTAKLAYEGLPSKTYLSKTLAQYTSKTCSNCGFTITSADYDRVLEKLKKTATGWMTTINGKELKVEGQITYYNRYKRQNVVKDLSVELDRLSEESVNNDISSWTKGRSGEALSLLKKRFSHRPVQEKFVCLNCGFETHADEQAALNIARSWLFLRSQEYKKYQTNKTTGNTDKRAFVETWQSFYRKKLKEVWKPAV

SEQ ID NO: 197 - protein, 978 aa, synthetic construct
QEIKRINGIRRRLVKDSNTKKAGKTGPMKTLLVRVMTPDLRERLENLRKKPENIPQPISNTSRANLNKLLTDYTEMKKAILHVYWEEFQKDPVGLMSRVAQPASKKIDQNKLKPEMDEKGNLTTAGFACSQCGQPLFVYKLEQVSEKGKAYTNYFGRCNVAEHEKLILLAQLKPEKDSDEAVTYSLGKFGQRALDFYSIHVTKESTHPVKPLAQIAGNRYASGPVGKALSDACMGTIASFLSKYQDIIIEHQKVVKGNQKRLESLRELAGKENLEYPSVTLPPQPHTKEGVDAYNEVIARVRMWVNLNLWQKLKLSRDDAKPLLRLKGFPSFPLVERQANEVDWWDMVCNVKKLINEKKEDGKVFWQNLAGYKRQEALRPYLSSEEDRKKGKKFARYQLGDLLLHLEKKHGEDWGKVYDEAWERIDKKVEGLSKHIKLEEERRSEDAQSKAALTDWLRAKASFVIEGLKEADKDEFCRCELKLQKWYGDLRGKPFAIEAENSILDISGFSKQYNCAFIWQKDGVKKLNLYLIINYFKGGKLRFKKIKPEAFEANRFYTVINKKSGEIVPMEVNFNFDDPNLIILPLAFGKRQGREFIWNDLLSLETGSLKLANGRVIEKTLYNRRTRQDEPALFVALTFERREVLDSSNIKPMNLIGVDRGENIPAVIALTDPEGCPLSRFKDSLGNPTHILRIGESYKEKQRTIQAKKEVEQRRAGGYSRKYASKAKNLADDMVRNTARDLLYYAVTQDAMLIFENLSRGFGRQGKRTFMAERQYTRMEDWLTAKLAYEGLPSKTYLSKTLAQYTSKTCSNCGFTITSADYDRVLEKLKKTATGWMTTINGKELKVEGQITYYNRYKRQNVVKDLSVELDRLSEESVNNDISSWTKGRSGEALSLLKKRFSHRPVQEKFVCLNCGFETHADEQAALNIARSWLFLRSQEYKKYQTNKTTGNTDKRAFVETWQSFYRKKLKEVWKPAV

SEQ ID NO: 198 - protein, 979 aa, synthetic construct
QEIKRINKIRRRLVKFDSNTKKAGKTGPMKTLLVRVMTPDLRERLENLRKKPENIPQPISNTSRANLNKLLTDYTEMKKAILHVYWEEFQKDPVGLMSRVAQPASKKIDQNKLKPEMDEKGNLTTAGFACSQCGQPLFVYKLEQVSEKGKAYTNYFGRCNVAEHEKLILLAQLKPEKDSDEAVTYSLGKFGQRALDFYSIHVTKESTHPVKPLAQIAGNRYASGPVGKALSDACMGTIASFLSKYQDIIIEHQKVVKGNQKRLESLRELAGKENLEYPSVTLPPQPHTKEGVDAYNEVIARVRMWVNLNLWQKLKLSRDDAKPLLRLKGFPSFPLVERQANEVDWWDMVCNVKKLINEKKEDGKVFWQNLAGYKRQEALRPYLSSEEDRKKGKKFARYQLGDLLLHLEKKHGEDWGKVYDEAWERIDKKVEGLSKHIKLEEERRSEDAQSKAALTDWLRAKASFVIEGLKEADKDEFCRCELKLQKWYGDLRGKPFAIEAENSILDISGFSKQYNCAFIWQKDGVKKLNLYLIINYFKGGKLRFKKIKPEAFEANRFYTVINKKSGEIVPMEVNFNFDDPNLIILPLAFGKRQGREFIWNDLLSLETGSLKLANGRVIEKTLYNRRTRQDEPALFVALTFERREVLDSSNIKPMNLIGVDRGENIPAVIALTDPEGCPLSRFKDSLGNPTHILRIGESYKEKQRTIQAKKEVEQRRAGGYSRKYASKAKNLADDMVRNTARDLLYYAVTQDAMLIFENLSRGFGRQGKRTFMAERQYTRMEDWLTAKLAYEGLPSKTYLSKTLAQYTSKTCSNCGFTITSADYDRVLEKLKKTATGWMTTINGKELKVEGQITYYNRYKRQNVVKDLSVELDRLSEESVNNDISSWTKGRSGEALSLLKKRFSHRPVQEKFVCLNCGFETHADEQAALNIARSWLFLRSQEYKKYQTNKTTGNTDKRAFVETWQSFYRKKLKEVWKPAV

SEQ ID NO: 199 - protein, 979 aa, synthetic construct
QEIKRINKIRRRLVKDSFNTKKAGKTGPMKTLLVRVMTPDLRERLENLRKKPENIPQPISNTSRANLNKLLTDYTEMKKAILHVYWEEFQKDPVGLMSRVAQPASKKIDQNKLKPEMDEKGNLTTAGFACSQCGQPLFVYKLEQVSEKGKAYTNYFGRCNVAEHEKLILLAQLKPEKDSDEAVTYSLGKFGQRALDFYSIHVTKESTHPVKPLAQIAGNRYASGPVGKALSDACMGTIASFLSKYQDIIIEHQKVVKGNQKRLESLRELAGKENLEYPSVTLPPQPHTKEGVDAYNEVIARVRMWVNLNLWQKLKLSRDDAKPLLRLKGFPSFPLVERQANEVDWWDMVCNVKKLINEKKEDGKVFWQNLAGYKRQEALRPYLSSEEDRKKGKKFARYQLGDLLLHLEKKHGEDWGKVYDEAWERIDKKVEGLSKHIKLEEERRSEDAQSKAALTDWLRAKASFVIEGLKEADKDEFCRCELKLQKWYGDLRGKPFAIEAENSILDISGFSKQYNCAFIWQKDGVKKLNLYLIINYFKGGKLRFKKIKPEAFEANRFYTVINKKSGEIVPMEVNFNFDDPNLIILPLAFGKRQGREFIWNDLLSLETGSLKLANGRVIEKTLYNRRTRQDEPALFVALTFERREVLDSSNIKPMNLIGVDRGENIPAVIALTDPEGCPLSRFKDSLGNPTHILRIGESYKEKQRTIQAKKEVEQRRAGGYSRKYASKAKNLADDMVRNTARDLLYYAVTQDAMLIFENLSRGFGRQGKRTFMAERQYTRMEDWLTAKLAYEGLPSKTYLSKTLAQYTSKTCSNCGFTITSADYDRVLEKLKKTATGWMTTINGKELKVEGQITYYNRYKRQNVVKDLSVELDRLSEESVNNDISSWTKGRSGEALSLLKKRFSHRPVQEKFVCLNCGFETHADEQAALNIARSWLFLRSQEYKKYQTNKTTGNTDKRAFVETWQSFYRKKLKEVWKPAV

SEQ ID NO: 200 - protein, 978 aa, synthetic construct
QEIKRINKIRRRLVKDSNTKKAGKTGPMKTLLVPVMTPDLRERLENLRKKPENIPQPISNTSRANLNKLLTDYTEMKKAILHVYWEEFQKDPVGLMSRVAQPASKKIDQNKLKPEMDEKGNLTTAGFACSQCGQPLFVYKLEQVSEKGKAYTNYFGRCNVAEHEKLILLAQLKPEKDSDEAVTYSLGKFGQRALDFYSIHVTKESTHPVKPLAQIAGNRYASGPVGKALSDACMGTIASFLSKYQDIIIEHQKVVKGNQKRLESLRELAGKENLEYPSVTLPPQPHTKEGVDAYNEVIARVRMWVNLNLWQKLKLSRDDAKPLLRLKGFPSFPLVERQANEVDWWDMVCNVKKLINEKKEDGKVFWQNLAGYKRQEALRPYLSSEEDRKKGKKFARYQLGDLLLHLEKKHGEDWGKVYDEAWERIDKKVEGLSKHIKLEEERRSEDAQSKAALTDWLRAKASFVIEGLKEADKDEFCRCELKLQKWYGDLRGKPFAIEAENSILDISGFSKQYNCAFIWQKDGVKKLNLYLIINYFKGGKLRFKKIKPEAFEANRFYTVINKKSGEIVPMEVNFNFDDPNLIILPLAFGKRQGREFIWNDLLSLETGSLKLANGRVIEKTLYNRRTRQDEPALFVALTFERREVLDSSNIKPMNLIGVDRGENIPAVIALTDPEGCPLSRFKDSLGNPTHILRIGESYKEKQRTIQAKKEVEQRRAGGYSRKYASKAKNLADDMVRNTARDLLYYAVTQDAMLIFENLSRGFGRQGKRTFMAERQYTRMEDWLTAKLAYEGLPSKTYLSKTLAQYTSKTCSNCGFTITSADYDRVLEKLKKTATGWMTTINGKELKVEGQITYYNRYKRQNVVKDLSVELDRLSEESVNNDISSWTKGRSGEALSLLKKRFSHRPVQEKFVCLNCGFETHADEQAALNIARSWLFLRSQEYKKYQTNKTTGNTDKRAFVETWQSFYRKKLKEVWKPAV

SEQ ID NO: 201 - protein, 978 aa, synthetic construct
QEIKRINKIRRRLVKDSNTKKAGKTGPMKTLLVRVMTPDLRERLENLRKKPPNIPQPISNTSRANLNKLLTDYTEMKKAILHVYWEEFQKDPVGLMSRVAQPASKKIDQNKLKPEMDEKGNLTTAGFACSQCGQPLFVYKLEQVSEKGKAYTNYFGRCNVAEHEKLILLAQLKPEKDSDEAVTYSLGKFGQRALDFYSIHVTKESTHPVKPLAQIAGNRYASGPVGKALSDACMGTIASFLSKYQDIIIEHQKVVKGNQKRLESLRELAGKENLEYPSVTLPPQPHTKEGVDAYNEVIARVRMWVNLNLWQKLKLSRDDAKPLLRLKGFPSFPLVERQANEVDWWDMVCNVKKLINEKKEDGKVFWQNLAGYKRQEALRPYLSSEEDRKKGKKFARYQLGDLLLHLEKKHGEDWGKVYDEAWERIDKKVEGLSKHIKLEEERRSEDAQSKAALTDWLRAKASFVIEGLKEADKDEFCRCELKLQKWYGDLRGKPFAIEAENSILDISGFSKQYNCAFIWQKDGVKKLNLYLIINYFKGGKLRFKKIKPEAFEANRFYTVINKKSGEIVPMEVNFNFDDPNLIILPLAFGKRQGREFIWNDLLSLETGSLKLANGRVIEKTLYNRRTRQDEPALFVALTFERREVLDSSNIKPMNLIGVDRGENIPAVIALTDPEGCPLSRFKDSLGNPTHILRIGESYKEKQRTIQAKKEVEQRRAGGYSRKYASKAKNLADDMVRNTARDLLYYAVTQDAMLIFENLSRGFGRQGKRTFMAERQYTRMEDWLTAKLAYEGLPSKTYLSKTLAQYTSKTCSNCGFTITSADYDRVLEKLKKTATGWMTTINGKELKVEGQITYYNRYKRQNVVKDLSVELDRLSEESVNNDISSWTKGRSGEALSLLKKRFSHRPVQEKFVCLNCGFETHADEQAALNIARSWLFLRSQEYKKYQTNKTTGNTDKRAFVETWQSFYRKKLKEVWKPAV

SEQ ID NO: 202 - protein, 979 aa, synthetic construct
QEIKRINKIRRRLVKDSNTKKAGKTGPMKTLLVRVMTPDLRERLENLRKKPENIPPQPISNTSRANLNKLLTDYTEMKKAILHVYWEEFQKDPVGLMSRVAQPASKKIDQNKLKPEMDEKGNLTTAGFACSQCGQPLFVYKLEQVSEKGKAYTNYFGRCNVAEHEKLILLAQLKPEKDSDEAVTYSLGKFGQRALDFYSIHVTKESTHPVKPLAQIAGNRYASGPVGKALSDACMGTIASFLSKYQDIIIEHQKVVKGNQKRLESLRELAGKENLEYPSVTLPPQPHTKEGVDAYNEVIARVRMWVNLNLWQKLKLSRDDAKPLLRLKGFPSFPLVERQANEVDWWDMVCNVKKLINEKKEDGKVFWQNLAGYKRQEALRPYLSSEEDRKKGKKFARYQLGDLLLHLEKKHGEDWGKVYDEAWERIDKKVEGLSKHIKLEEERRSEDAQSKAALTDWLRAKASFVIEGLKEADKDEFCRCELKLQKWYGDLRGKPFAIEAENSILDISGFSKQYNCAFIWQKDGVKKLNLYLIINYFKGGKLRFKKIKPEAFEANRFYTVINKKSGEIVPMEVNFNFDDPNLIILPLAFGKRQGREFIWNDLLSLETGSLKLANGRVIEKTLYNRRTRQDEPALFVALTFERREVLDSSNIKPMNLIGVDRGENIPAVIALTDPEGCPLSRFKDSLGNPTHILRIGESYKEKQRTIQAKKEVEQRRAGGYSRKYASKAKNLADDMVRNTARDLLYYAVTQDAMLIFENLSRGFGRQGKRTFMAERQYTRMEDWLTAKLAYEGLPSKTYLSKTLAQYTSKTCSNCGFTITSADYDRVLEKLKKTATGWMTTINGKELKVEGQITYYNRYKRQNVVKDLSVELDRLSEESVNNDISSWTKGRSGEALSLLKKRFSHRPVQEKFVCLNCGFETHADEQAALNIARSWLFLRSQEYKKYQTNKTTGNTDKRAFVETWQSFYRKKLKEVWKPAV

SEQ ID NO: 203 - protein, 978 aa, synthetic construct
QEIKRINKIRRRLVKDSNTKKAGKTGPMKTLLVRVMTPDLRERLENLRKKPENIPPPISNTSRANLNKLLTDYTEMKKAILHVYWEEFQKDPVGLMSRVAQPASKKIDQNKLKPEMDEKGNLTTAGFACSQCGQPLFVYKLEQVSEKGKAYTNYFGRCNVAEHEKLILLAQLKPEKDSDEAVTYSLGKFGQRALDFYSIHVTKESTHPVKPLAQIAGNRYASGPVGKALSDACMGTIASFLSKYQDIIIEHQKVVKGNQKRLESLRELAGKENLEYPSVTLPPQPHTKEGVDAYNEVIARVRMWVNLNLWQKLKLSRDDAKPLLRLKGFPSFPLVERQANEVDWWDMVCNVKKLINEKKEDGKVFWQNLAGYKRQEALRPYLSSEEDRKKGKKFARYQLGDLLLHLEKKHGEDWGKVYDEAWERIDKKVEGLSKHIKLEEERRSEDAQSKAALTDWLRAKASFVIEGLKEADKDEFCRCELKLQKWYGDLRGKPFAIEAENSILDISGFSKQYNCAFIWQKDGVKKLNLYLIINYFKGGKLRFKKIKPEAFEANRFYTVINKKSGEIVPMEVNFNFDDPNLIILPLAFGKRQGREFIWNDLLSLETGSLKLANGRVIEKTLYNRRTRQDEPALFVALTFERREVLDSSNIKPMNLIGVDRGENIPAVIALTDPEGCPLSRFKDSLGNPTHILRIGESYKEKQRTIQAKKEVEQRRAGGYSRKYASKAKNLADDMVRNTARDLLYYAVTQDAMLIFENLSRGFGRQGKRTFMAERQYTRMEDWLTAKLAYEGLPSKTYLSKTLAQYTSKTCSNCGFTITSADYDRVLEKLKKTATGWMTTINGKELKVEGQITYYNRYKRQNVVKDLSVELDRLSEESVNNDISSWTKGRSGEALSLLKKRFSHRPVQEKFVCLNCGFETHADEQAALNIARSWLFLRSQEYKKYQTNKTTGNTDKRAFVETWQSFYRKKLKEVWKPAV

SEQ ID NO: 204 - protein, 978 aa, synthetic construct
QEIKRINKIRRRLVKDSNTKKAGKTGPMKTLLVRVMTPDLRERLENLRKKPENIPQPISNTSSANLNKLLTDYTEMKKAILHVYWEEFQKDPVGLMSRVAQPASKKIDQNKLKPEMDEKGNLTTAGFACSQCGQPLFVYKLEQVSEKGKAYTNYFGRCNVAEHEKLILLAQLKPEKDSDEAVTYSLGKFGQRALDFYSIHVTKESTHPVKPLAQIAGNRYASGPVGKALSDACMGTIASFLSKYQDIIIEHQKVVKGNQKRLESLRELAGKENLEYPSVTLPPQPHTKEGVDAYNEVIARVRMWVNLNLWQKLKLSRDDAKPLLRLKGFPSFPLVERQANEVDWWDMVCNVKKLINEKKEDGKVFWQNLAGYKRQEALRPYLSSEEDRKKGKKFARYQLGDLLLHLEKKHGEDWGKVYDEAWERIDKKVEGLSKHIKLEEERRSEDAQSKAALTDWLRAKASFVIEGLKEADKDEFCRCELKLQKWYGDLRGKPFAIEAENSILDISGFSKQYNCAFIWQKDGVKKLNLYLIINYFKGGKLRFKKIKPEAFEANRFYTVINKKSGEIVPMEVNFNFDDPNLIILPLAFGKRQGREFIWNDLLSLETGSLKLANGRVIEKTLYNRRTRQDEPALFVALTFERREVLDSSNIKPMNLIGVDRGENIPAVIALTDPEGCPLSRFKDSLGNPTHILRIGESYKEKQRTIQAKKEVEQRRAGGYSRKYASKAKNLADDMVRNTARDLLYYAVTQDAMLIFENLSRGFGRQGKRTFMAERQYTRMEDWLTAKLAYEGLPSKTYLSKTLAQYTSKTCSNCGFTITSADYDRVLEKLKKTATGWMTTINGKELKVEGQITYYNRYKRQNVVKDLSVELDRLSEESVNNDISSWTKGRSGEALSLLKKRFSHRPVQEKFVCLNCGFETHADEQAALNIARSWLFLRSQEYKKYQTNKTTGNTDKRAFVETWQSFYRKKLKEVWKPAV

SEQ ID NO: 205 - protein, 978 aa, synthetic construct
QEIKRINKIRRRLVKDSNTKKAGKTGPMKTLLVRVMTPDLRERLENLRKKPENIPQPISNTSQANLNKLLTDYTEMKKAILHVYWEEFQKDPVGLMSRVAQPASKKIDQNKLKPEMDEKGNLTTAGFACSQCGQPLFVYKLEQVSEKGKAYTNYFGRCNVAEHEKLILLAQLKPEKDSDEAVTYSLGKFGQRALDFYSIHVTKESTHPVKPLAQIAGNRYASGPVGKALSDACMGTIASFLSKYQDIIIEHQKVVKGNQKRLESLRELAGKENLEYPSVTLPPQPHTKEGVDAYNEVIARVRMWVNLNLWQKLKLSRDDAKPLLRLKGFPSFPLVERQANEVDWWDMVCNVKKLINEKKEDGKVFWQNLAGYKRQEALRPYLSSEEDRKKGKKFARYQLGDLLLHLEKKHGEDWGKVYDEAWERIDKKVEGLSKHIKLEEERRSEDAQSKAALTDWLRAKASFVIEGLKEADKDEFCRCELKLQKWYGDLRGKPFAIEAENSILDISGFSKQYNCAFIWQKDGVKKLNLYLIINYFKGGKLRFKKIKPEAFEANRFYTVINKKSGEIVPMEVNFNFDDPNLIILPLAFGKRQGREFIWNDLLSLETGSLKLANGRVIEKTLYNRRTRQDEPALFVALTFERREVLDSSNIKPMNLIGVDRGENIPAVIALTDPEGCPLSRFKDSLGNPTHILRIGESYKEKQRTIQAKKEVEQRRAGGYSRKYASKAKNLADDMVRNTARDLLYYAVTQDAMLIFENLSRGFGRQGKRTFMAERQYTRMEDWLTAKLAYEGLPSKTYLSKTLAQYTSKTCSNCGFTITSADYDRVLEKLKKTATGWMTTINGKELKVEGQITYYNRYKRQNVVKDLSVELDRLSEESVNNDISSWTKGRSGEALSLLKKRFSHRPVQEKFVCLNCGFETHADEQAALNIARSWLFLRSQEYKKYQTNKTTGNTDKRAFVETWQSFYRKKLKEVWKPAV

SEQ ID NO: 206 - protein, 978 aa, synthetic construct
QEIKRINKIRRRLVKDSNTKKAGKTGPMKTLLVRVMTPDLRERLENLRKKPENIPQPISNTSRANLNKLLTDYTEMKKAITHVYWEEFQKDPVGLMSRVAQPASKKIDQNKLKPEMDEKGNLTTAGFACSQCGQPLFVYKLEQVSEKGKAYTNYFGRCNVAEHEKLILLAQLKPEKDSDEAVTYSLGKFGQRALDFYSIHVTKESTHPVKPLAQIAGNRYASGPVGKALSDACMGTIASFLSKYQDIIIEHQKVVKGNQKRLESLRELAGKENLEYPSVTLPPQPHTKEGVDAYNEVIARVRMWVNLNLWQKLKLSRDDAKPLLRLKGFPSFPLVERQANEVDWWDMVCNVKKLINEKKEDGKVFWQNLAGYKRQEALRPYLSSEEDRKKGKKFARYQLGDLLLHLEKKHGEDWGKVYDEAWERIDKKVEGLSKHIKLEEERRSEDAQSKAALTDWLRAKASFVIEGLKEADKDEFCRCELKLQKWYGDLRGKPFAIEAENSILDISGFSKQYNCAFIWQKDGVKKLNLYLIINYFKGGKLRFKKIKPEAFEANRFYTVINKKSGEIVPMEVNFNFDDPNLIILPLAFGKRQGREFIWNDLLSLETGSLKLANGRVIEKTLYNRRTRQDEPALFVALTFERREVLDSSNIKPMNLIGVDRGENIPAVIALTDPEGCPLSRFKDSLGNPTHILRIGESYKEKQRTIQAKKEVEQRRAGGYSRKYASKAKNLADDMVRNTARDLLYYAVTQDAMLIFENLSRGFGRQGKRTFMAERQYTRMEDWLTAKLAYEGLPSKTYLSKTLAQYTSKTCSNCGFTITSADYDRVLEKLKKTATGWMTTINGKELKVEGQITYYNRYKRQNVVKDLSVELDRLSEESVNNDISSWTKGRSGEALSLLKKRFSHRPVQEKFVCLNCGFETHADEQAALNIARSWLFLRSQEYKKYQTNKTTGNTDKRAFVETWQSFYRKKLKEVWKPAV

SEQ ID NO: 207 - protein, 978 aa, synthetic construct
QEIKRINKIRRRLVKDSNTKKAGKTGPMKTLLVRVMTPDLRERLENLRKKPENIPQPISNTSRANLNKLLTDYTEMKKAILHVYGEEFQKDPVGLMSRVAQPASKKIDQNKLKPEMDEKGNLTTAGFACSQCGQPLFVYKLEQVSEKGKAYTNYFGRCNVAEHEKLILLAQLKPEKDSDEAVTYSLGKFGQRALDFYSIHVTKESTHPVKPLAQIAGNRYASGPVGKALSDACMGTIASFLSKYQDIIIEHQKVVKGNQKRLESLRELAGKENLEYPSVTLPPQPHTKEGVDAYNEVIARVRMWVNLNLWQKLKLSRDDAKPLLRLKGFPSFPLVERQANEVDWWDMVCNVKKLINEKKEDGKVFWQNLAGYKRQEALRPYLSSEEDRKKGKKFARYQLGDLLLHLEKKHGEDWGKVYDEAWERIDKKVEGLSKHIKLEEERRSEDAQSKAALTDWLRAKASFVIEGLKEADKDEFCRCELKLQKWYGDLRGKPFAIEAENSILDISGFSKQYNCAFIWQKDGVKKLNLYLIINYFKGGKLRFKKIKPEAFEANRFYTVINKKSGEIVPMEVNFNFDDPNLIILPLAFGKRQGREFIWNDLLSLETGSLKLANGRVIEKTLYNRRTRQDEPALFVALTFERREVLDSSNIKPMNLIGVDRGENIPAVIALTDPEGCPLSRFKDSLGNPTHILRIGESYKEKQRTIQAKKEVEQRRAGGYSRKYASKAKNLADDMVRNTARDLLYYAVTQDAMLIFENLSRGFGRQGKRTFMAERQYTRMEDWLTAKLAYEGLPSKTYLSKTLAQYTSKTCSNCGFTITSADYDRVLEKLKKTATGWMTTINGKELKVEGQITYYNRYKRQNVVKDLSVELDRLSEESVNNDISSWTKGRSGEALSLLKKRFSHRPVQEKFVCLNCGFETHADEQAALNIARSWLFLRSQEYKKYQTNKTTGNTDKRAFVETWQSFYRKKLKEVWKPAV

SEQ ID NO: 208 - protein, 978 aa, synthetic construct
QEIKRINKIRRRLVKDSNTKKAGKTGPMKTLLVRVMTPDLRERLENLRKKPENIPQPISNTSRANLNKLLTDYTEMKKAILHVYDEEFQKDPVGLMSRVAQPASKKIDQNKLKPEMDEKGNLTTAGFACSQCGQPLFVYKLEQVSEKGKAYTNYFGRCNVAEHEKLILLAQLKPEKDSDEAVTYSLGKFGQRALDFYSIHVTKESTHPVKPLAQIAGNRYASGPVGKALSDACMGTIASFLSKYQDIIIEHQKVVKGNQKRLESLRELAGKENLEYPSVTLPPQPHTKEGVDAYNEVIARVRMWVNLNLWQKLKLSRDDAKPLLRLKGFPSFPLVERQANEVDWWDMVCNVKKLINEKKEDGKVFWQNLAGYKRQEALRPYLSSEEDRKKGKKFARYQLGDLLLHLEKKHGEDWGKVYDEAWERIDKKVEGLSKHIKLEEERRSEDAQSKAALTDWLRAKASFVIEGLKEADKDEFCRCELKLQKWYGDLRGKPFAIEAENSILDISGFSKQYNCAFIWQKDGVKKLNLYLIINYFKGGKLRFKKIKPEAFEANRFYTVINKKSGEIVPMEVNFNFDDPNLIILPLAFGKRQGREFIWNDLLSLETGSLKLANGRVIEKTLYNRRTRQDEPALFVALTFERREVLDSSNIKPMNLIGVDRGENIPAVIALTDPEGCPLSRFKDSLGNPTHILRIGESYKEKQRTIQAKKEVEQRRAGGYSRKYASKAKNLADDMVRNTARDLLYYAVTQDAMLIFENLSRGFGRQGKRTFMAERQYTRMEDWLTAKLAYEGLPSKTYLSKTLAQYTSKTCSNCGFTITSADYDRVLEKLKKTATGWMTTINGKELKVEGQITYYNRYKRQNVVKDLSVELDRLSEESVNNDISSWTKGRSGEALSLLKKRFSHRPVQEKFVCLNCGFETHADEQAALNIARSWLFLRSQEYKKYQTNKTTGNTDKRAFVETWQSFYRKKLKEVWKPAV

SEQ ID NO: 209 - protein, 978 aa, synthetic construct
QEIKRINKIRRRLVKDSNTKKAGKTGPMKTLLVRVMTPDLRERLENLRKKPENIPQPISNTSRANLNKLLTDYTEMKKAILHVYAEEFQKDPVGLMSRVAQPASKKIDQNKLKPEMDEKGNLTTAGFACSQCGQPLFVYKLEQVSEKGKAYTNYFGRCNVAEHEKLILLAQLKPEKDSDEAVTYSLGKFGQRALDFYSIHVTKESTHPVKPLAQIAGNRYASGPVGKALSDACMGTIASFLSKYQDIIIEHQKVVKGNQKRLESLRELAGKENLEYPSVTLPPQPHTKEGVDAYNEVIARVRMWVNLNLWQKLKLSRDDAKPLLRLKGFPSFPLVERQANEVDWWDMVCNVKKLINEKKEDGKVFWQNLAGYKRQEALRPYLSSEEDRKKGKKFARYQLGDLLLHLEKKHGEDWGKVYDEAWERIDKKVEGLSKHIKLEEERRSEDAQSKAALTDWLRAKASFVIEGLKEADKDEFCRCELKLQKWYGDLRGKPFAIEAENSILDISGFSKQYNCAFIWQKDGVKKLNLYLIINYFKGGKLRFKKIKPEAFEANRFYTVINKKSGEIVPMEVNFNFDDPNLIILPLAFGKRQGREFIWNDLLSLETGSLKLANGRVIEKTLYNRRTRQDEPALFVALTFERREVLDSSNIKPMNLIGVDRGENIPAVIALTDPEGCPLSRFKDSLGNPTHILRIGESYKEKQRTIQAKKEVEQRRAGGYSRKYASKAKNLADDMVRNTARDLLYYAVTQDAMLIFENLSRGFGRQGKRTFMAERQYTRMEDWLTAKLAYEGLPSKTYLSKTLAQYTSKTCSNCGFTITSADYDRVLEKLKKTATGWMTTINGKELKVEGQITYYNRYKRQNVVKDLSVELDRLSEESVNNDISSWTKGRSGEALSLLKKRFSHRPVQEKFVCLNCGFETHADEQAALNIARSWLFLRSQEYKKYQTNKTTGNTDKRAFVETWQSFYRKKLKEVWKPAV

SEQ ID NO: 210 - protein, 978 aa, synthetic construct
QEIKRINKIRRRLVKDSNTKKAGKTGPMKTLLVRVMTPDLRERLENLRKKPENIPQPISNTSRANLNKLLTDYTEMKKAILHVYREEFQKDPVGLMSRVAQPASKKIDQNKLKPEMDEKGNLTTAGFACSQCGQPLFVYKLEQVSEKGKAYTNYFGRCNVAEHEKLILLAQLKPEKDSDEAVTYSLGKFGQRALDFYSIHVTKESTHPVKPLAQIAGNRYASGPVGKALSDACMGTIASFLSKYQDIIIEHQKVVKGNQKRLESLRELAGKENLEYPSVTLPPQPHTKEGVDAYNEVIARVRMWVNLNLWQKLKLSRDDAKPLLRLKGFPSFPLVERQANEVDWWDMVCNVKKLINEKKEDGKVFWQNLAGYKRQEALRPYLSSEEDRKKGKKFARYQLGDLLLHLEKKHGEDWGKVYDEAWERIDKKVEGLSKHIKLEEERRSEDAQSKAALTDWLRAKASFVIEGLKEADKDEFCRCELKLQKWYGDLRGKPFAIEAENSILDISGFSKQYNCAFIWQKDGVKKLNLYLIINYFKGGKLRFKKIKPEAFEANRFYTVINKKSGEIVPMEVNFNFDDPNLIILPLAFGKRQGREFIWNDLLSLETGSLKLANGRVIEKTLYNRRTRQDEPALFVALTFERREVLDSSNIKPMNLIGVDRGENIPAVIALTDPEGCPLSRFKDSLGNPTHILRIGESYKEKQRTIQAKKEVEQRRAGGYSRKYASKAKNLADDMVRNTARDLLYYAVTQDAMLIFENLSRGFGRQGKRTFMAERQYTRMEDWLTAKLAYEGLPSKTYLSKTLAQYTSKTCSNCGFTITSADYDRVLEKLKKTATGWMTTINGKELKVEGQITYYNRYKRQNVVKDLSVELDRLSEESVNNDISSWTKGRSGEALSLLKKRFSHRPVQEKFVCLNCGFETHADEQAALNIARSWLFLRSQEYKKYQTNKTTGNTDKRAFVETWQSFYRKKLKEVWKPAV

SEQ ID NO: 211 - protein, 978 aa, synthetic construct
QEIKRINKIRRRLVKDSNTKKAGKTGPMKTLLVRVMTPDLRERLENLRKKPENIPQPISNTSRANLNKLLTDYTEMKKAILHVYWEEFQKDPVGLMSRVAQPASKKIDQNKLKPEMDEKGNLTTAGFACSQCGQPLFVYKLEQVSEKGKAYTNYFGRCNVAEHEKLIKLAQLKPEKDSDEAVTYSLGKFGQRALDFYSIHVTKESTHPVKPLAQIAGNRYASGPVGKALSDACMGTIASFLSKYQDIIIEHQKVVKGNQKRLESLRELAGKENLEYPSVTLPPQPHTKEGVDAYNEVIARVRMWVNLNLWQKLKLSRDDAKPLLRLKGFPSFPLVERQANEVDWWDMVCNVKKLINEKKEDGKVFWQNLAGYKRQEALRPYLSSEEDRKKGKKFARYQLGDLLLHLEKKHGEDWGKVYDEAWERIDKKVEGLSKHIKLEEERRSEDAQSKAALTDWLRAKASFVIEGLKEADKDEFCRCELKLQKWYGDLRGKPFAIEAENSILDISGFSKQYNCAFIWQKDGVKKLNLYLIINYFKGGKLRFKKIKPEAFEANRFYTVINKKSGEIVPMEVNFNFDDPNLIILPLAFGKRQGREFIWNDLLSLETGSLKLANGRVIEKTLYNRRTRQDEPALFVALTFERREVLDSSNIKPMNLIGVDRGENIPAVIALTDPEGCPLSRFKDSLGNPTHILRIGESYKEKQRTIQAKKEVEQRRAGGYSRKYASKAKNLADDMVRNTARDLLYYAVTQDAMLIFENLSRGFGRQGKRTFMAERQYTRMEDWLTAKLAYEGLPSKTYLSKTLAQYTSKTCSNCGFTITSADYDRVLEKLKKTATGWMTTINGKELKVEGQITYYNRYKRQNVVKDLSVELDRLSEESVNNDISSWTKGRSGEALSLLKKRFSHRPVQEKFVCLNCGFETHADEQAALNIARSWLFLRSQEYKKYQTNKTTGNTDKRAFVETWQSFYRKKLKEVWKPAV

SEQ ID NO: 212 - protein, 978 aa, synthetic construct
QEIKRINKIRRRLVKDSNTKKAGKTGPMKTLLVRVMTPDLRERLENLRKKPENIPQPISNTSRANLNKLLTDYTEMKKAILHVYWEEFQKDPVGLMSRVAQPASKKIDQNKLKPEMDEKGNLTTAGFACSQCGQPLFVYKLEQVSEKGKAYTNYFGRCNVAEHEKLILLYQLKPEKDSDEAVTYSLGKFGQRALDFYSIHVTKESTHPVKPLAQIAGNRYASGPVGKALSDACMGTIASFLSKYQDIIIEHQKVVKGNQKRLESLRELAGKENLEYPSVTLPPQPHTKEGVDAYNEVIARVRMWVNLNLWQKLKLSRDDAKPLLRLKGFPSFPLVERQANEVDWWDMVCNVKKLINEKKEDGKVFWQNLAGYKRQEALRPYLSSEEDRKKGKKFARYQLGDLLLHLEKKHGEDWGKVYDEAWERIDKKVEGLSKHIKLEEERRSEDAQSKAALTDWLRAKASFVIEGLKEADKDEFCRCELKLQKWYGDLRGKPFAIEAENSILDISGFSKQYNCAFIWQKDGVKKLNLYLIINYFKGGKLRFKKIKPEAFEANRFYTVINKKSGEIVPMEVNFNFDDPNLIILPLAFGKRQGREFIWNDLLSLETGSLKLANGRVIEKTLYNRRTRQDEPALFVALTFERREVLDSSNIKPMNLIGVDRGENIPAVIALTDPEGCPLSRFKDSLGNPTHILRIGESYKEKQRTIQAKKEVEQRRAGGYSRKYASKAKNLADDMVRNTARDLLYYAVTQDAMLIFENLSRGFGRQGKRTFMAERQYTRMEDWLTAKLAYEGLPSKTYLSKTLAQYTSKTCSNCGFTITSADYDRVLEKLKKTATGWMTTINGKELKVEGQITYYNRYKRQNVVKDLSVELDRLSEESVNNDISSWTKGRSGEALSLLKKRFSHRPVQEKFVCLNCGFETHADEQAALNIARSWLFLRSQEYKKYQTNKTTGNTDKRAFVETWQSFYRKKLKEVWKPAV

SEQ ID NO: 213 - protein, 978 aa, synthetic construct
QEIKRINKIRRRLVKDSNTKKAGKTGPMKTLLVRVMTPDLRERLENLRKKPENIPQPISNTSRANLNKLLTDYTEMKKAILHVYWEEFQKDPVGLMSRVAQPASKKIDQNKLKPEMDEKGNLTTAGFACSQCGQPLFVYKLEQVSEKGKAYTNYFGRCNVAEHEKLILLSQLKPEKDSDEAVTYSLGKFGQRALDFYSIHVTKESTHPVKPLAQIAGNRYASGPVGKALSDACMGTIASFLSKYQDIIIEHQKVVKGNQKRLESLRELAGKENLEYPSVTLPPQPHTKEGVDAYNEVIARVRMWVNLNLWQKLKLSRDDAKPLLRLKGFPSFPLVERQANEVDWWDMVCNVKKLINEKKEDGKVFWQNLAGYKRQEALRPYLSSEEDRKKGKKFARYQLGDLLLHLEKKHGEDWGKVYDEAWERIDKKVEGLSKHIKLEEERRSEDAQSKAALTDWLRAKASFVIEGLKEADKDEFCRCELKLQKWYGDLRGKPFAIEAENSILDISGFSKQYNCAFIWQKDGVKKLNLYLIINYFKGGKLRFKKIKPEAFEANRFYTVINKKSGEIVPMEVNFNFDDPNLIILPLAFGKRQGREFIWNDLLSLETGSLKLANGRVIEKTLYNRRTRQDEPALFVALTFERREVLDSSNIKPMNLIGVDRGENIPAVIALTDPEGCPLSRFKDSLGNPTHILRIGESYKEKQRTIQAKKEVEQRRAGGYSRKYASKAKNLADDMVRNTARDLLYYAVTQDAMLIFENLSRGFGRQGKRTFMAERQYTRMEDWLTAKLAYEGLPSKTYLSKTLAQYTSKTCSNCGFTITSADYDRVLEKLKKTATGWMTTINGKELKVEGQITYYNRYKRQNVVKDLSVELDRLSEESVNNDISSWTKGRSGEALSLLKKRFSHRPVQEKFVCLNCGFETHADEQAALNIARSWLFLRSQEYKKYQTNKTTGNTDKRAFVETWQSFYRKKLKEVWKPAV

SEQ ID NO: 214 - protein, 978 aa, synthetic construct
QEIKRINKIRRRLVKDSNTKKAGKTGPMKTLLVRVMTPDLRERLENLRKKPENIPQPISNTSRANLNKLLTDYTEMKKAILHVYWEEFQKDPVGLMSRVAQPASKKIDQNKLKPEMDEKGNLTTAGFACSQCGQPLFVYKLEQVSEKGKAYTNYFGRCNVAEHEKLILLAQLKPPKDSDEAVTYSLGKFGQRALDFYSIHVTKESTHPVKPLAQIAGNRYASGPVGKALSDACMGTIASFLSKYQDIIIEHQKVVKGNQKRLESLRELAGKENLEYPSVTLPPQPHTKEGVDAYNEVIARVRMWVNLNLWQKLKLSRDDAKPLLRLKGFPSFPLVERQANEVDWWDMVCNVKKLINEKKEDGKVFWQNLAGYKRQEALRPYLSSEEDRKKGKKFARYQLGDLLLHLEKKHGEDWGKVYDEAWERIDKKVEGLSKHIKLEEERRSEDAQSKAALTDWLRAKASFVIEGLKEADKDEFCRCELKLQKWYGDLRGKPFAIEAENSILDISGFSKQYNCAFIWQKDGVKKLNLYLIINYFKGGKLRFKKIKPEAFEANRFYTVINKKSGEIVPMEVNFNFDDPNLIILPLAFGKRQGREFIWNDLLSLETGSLKLANGRVIEKTLYNRRTRQDEPALFVALTFERREVLDSSNIKPMNLIGVDRGENIPAVIALTDPEGCPLSRFKDSLGNPTHILRIGESYKEKQRTIQAKKEVEQRRAGGYSRKYASKAKNLADDMVRNTARDLLYYAVTQDAMLIFENLSRGFGRQGKRTFMAERQYTRMEDWLTAKLAYEGLPSKTYLSKTLAQYTSKTCSNCGFTITSADYDRVLEKLKKTATGWMTTINGKELKVEGQITYYNRYKRQNVVKDLSVELDRLSEESVNNDISSWTKGRSGEALSLLKKRFSHRPVQEKFVCLNCGFETHADEQAALNIARSWLFLRSQEYKKYQTNKTTGNTDKRAFVETWQSFYRKKLKEVWKPAV

SEQ ID NO: 215 - protein, 977 aa, synthetic construct
QEIKRINKIRRRLVKDSNTKKAGKTGPMKTLLVRVMTPDLRERLENLRKKPENIPQPISNTSRANLNKLLTDYTEMKKAILHVYWEEFQKDPVGLMSRVAQPASKKIDQNKLKPEMDEKGNLTTAGFACSQCGQPLFVYKLEQVSEKGKAYTNYFGRCNVAEHEKLILLAQLKPEKDSDEAVTYSLGKFGQRALDFYSIHVTKESTHPVKPLAQIAGNRYASPVGKALSDACMGTIASFLSKYQDIIIEHQKVVKGNQKRLESLRELAGKENLEYPSVTLPPQPHTKEGVDAYNEVIARVRMWVNLNLWQKLKLSRDDAKPLLRLKGFPSFPLVERQANEVDWWDMVCNVKKLINEKKEDGKVFWQNLAGYKRQEALRPYLSSEEDRKKGKKFARYQLGDLLLHLEKKHGEDWGKVYDEAWERIDKKVEGLSKHIKLEEERRSEDAQSKAALTDWLRAKASFVIEGLKEADKDEFCRCELKLQKWYGDLRGKPFAIEAENSILDISGFSKQYNCAFIWQKDGVKKLNLYLIINYFKGGKLRFKKIKPEAFEANRFYTVINKKSGEIVPMEVNFNFDDPNLIILPLAFGKRQGREFIWNDLLSLETGSLKLANGRVIEKTLYNRRTRQDEPALFVALTFERREVLDSSNIKPMNLIGVDRGENIPAVIALTDPEGCPLSRFKDSLGNPTHILRIGESYKEKQRTIQAKKEVEQRRAGGYSRKYASKAKNLADDMVRNTARDLLYYAVTQDAMLIFENLSRGFGRQGKRTFMAERQYTRMEDWLTAKLAYEGLPSKTYLSKTLAQYTSKTCSNCGFTITSADYDRVLEKLKKTATGWMTTINGKELKVEGQITYYNRYKRQNVVKDLSVELDRLSEESVNNDISSWTKGRSGEALSLLKKRFSHRPVQEKFVCLNCGFETHADEQAALNIARSWLFLRSQEYKKYQTNKTTGNTDKRAFVETWQSFYRKKLKEVWKPAV

SEQ ID NO: 216 - protein, 978 aa, synthetic construct; identical to SEQ ID NO: 164

SEQ ID NO: 217 - protein, 978 aa, synthetic construct
QEIKRINKIRRRLVKDSNTKKAGKTGPMKTLLVRVMTPDLRERLENLRKKPENIPQPISNTSRANLNKLLTDYTEMKKAILHVYWEEFQKDPVGLMSRVAQPASKKIDQNKLKPEMDEKGNLTTAGFACSQCGQPLFVYKLEQVSEKGKAYTNYFGRCNVAEHEKLILLAQLKPEKDSDEAVTYSLGKFGQRALDFYSIHVTKESTHPVKPLAQIAGNRYASGPVGKALSDACMGTIASFLSKYQDIIIEHQKVVKGNQKRLESLRELAGKENLEYPSVTLPPQPHTGEGVDAYNEVIARVRMWVNLNLWQKLKLSRDDAKPLLRLKGFPSFPLVERQANEVDWWDMVCNVKKLINEKKEDGKVFWQNLAGYKRQEALRPYLSSEEDRKKGKKFARYQLGDLLLHLEKKHGEDWGKVYDEAWERIDKKVEGLSKHIKLEEERRSEDAQSKAALTDWLRAKASFVIEGLKEADKDEFCRCELKLQKWYGDLRGKPFAIEAENSILDISGFSKQYNCAFIWQKDGVKKLNLYLIINYFKGGKLRFKKIKPEAFEANRFYTVINKKSGEIVPMEVNFNFDDPNLIILPLAFGKRQGREFIWNDLLSLETGSLKLANGRVIEKTLYNRRTRQDEPALFVALTFERREVLDSSNIKPMNLIGVDRGENIPAVIALTDPEGCPLSRFKDSLGNPTHILRIGESYKEKQRTIQAKKEVEQRRAGGYSRKYASKAKNLADDMVRNTARDLLYYAVTQDAMLIFENLSRGFGRQGKRTFMAERQYTRMEDWLTAKLAYEGLPSKTYLSKTLAQYTSKTCSNCGFTITSADYDRVLEKLKKTATGWMTTINGKELKVEGQITYYNRYKRQNVVKDLSVELDRLSEESVNNDISSWTKGRSGEALSLLKKRFSHRPVQEKFVCLNCGFETHADEQAALNIARSWLFLRSQEYKKYQTNKTTGNTDKRAFVETWQSFYRKKLKEVWKPAV

SEQ ID NO: 218 - protein, 978 aa, synthetic construct
QEIKRINKIRRRLVKDSNTKKAGKTGPMKTLLVRVMTPDLRERLENLRKKPENIPQPISNTSRANLNKLLTDYTEMKKAILHVYWEEFQKDPVGLMSRVAQPASKKIDQNKLKPEMDEKGNLTTAGFACSQCGQPLFVYKLEQVSEKGKAYTNYFGRCNVAEHEKLILLAQLKPEKDSDEAVTYSLGKFGQRALDFYSIHVTKESTHPVKPLAQIAGNRYASGPVGKALSDACMGTIASFLSKYQDIIIEHQKVVKGNQKRLESLRELAGKENLEYPSVTLPPQPHTSEGVDAYNEVIARVRMWVNLNLWQKLKLSRDDAKPLLRLKGFPSFPLVERQANEVDWWDMVCNVKKLINEKKEDGKVFWQNLAGYKRQEALRPYLSSEEDRKKGKKFARYQLGDLLLHLEKKHGEDWGKVYDEAWERIDKKVEGLSKHIKLEEERRSEDAQSKAALTDWLRAKASFVIEGLKEADKDEFCRCELKLQKWYGDLRGKPFAIEAENSILDISGFSKQYNCAFIWQKDGVKKLNLYLIINYFKGGKLRFKKIKPEAFEANRFYTVINKKSGEIVPMEVNFNFDDPNLIILPLAFGKRQGREFIWNDLLSLETGSLKLANGRVIEKTLYNRRTRQDEPALFVALTFERREVLDSSNIKPMNLIGVDRGENIPAVIALTDPEGCPLSRFKDSLGNPTHILRIGESYKEKQRTIQAKKEVEQRRAGGYSRKYASKAKNLADDMVRNTARDLLYYAVTQDAMLIFENLSRGFGRQGKRTFMAERQYTRMEDWLTAKLAYEGLPSKTYLSKTLAQYTSKTCSNCGFTITSADYDRVLEKLKKTATGWMTTINGKELKVEGQITYYNRYKRQNVVKDLSVELDRLSEESVNNDISSWTKGRSGEALSLLKKRFSHRPVQEKFVCLNCGFETHADEQAALNIARSWLFLRSQEYKKYQTNKTTGNTDKRAFVETWQSFYRKKLKEVWKPAV

SEQ ID NO: 219 - protein, 978 aa, synthetic construct
QEIKRINKIRRRLVKDSNTKKAGKTGPMKTLLVRVMTPDLRERLENLRKKPENIPQPISNTSRANLNKLLTDYTEMKKAILHVYWEEFQKDPVGLMSRVAQPASKKIDQNKLKPEMDEKGNLTTAGFACSQCGQPLFVYKLEQVSEKGKAYTNYFGRCNVAEHEKLILLAQLKPEKDSDEAVTYSLGKFGQRALDFYSIHVTKESTHPVKPLAQIAGNRYASGPVGKALSDACMGTIASFLSKYQDIIIEHQKVVKGNQKRLESLRELAGKENLEYPSVTLPPQPHTKEGLDAYNEVIARVRMWVNLNLWQKLKLSRDDAKPLLRLKGFPSFPLVERQANEVDWWDMVCNVKKLINEKKEDGKVFWQNLAGYKRQEALRPYLSSEEDRKKGKKFARYQLGDLLLHLEKKHGEDWGKVYDEAWERIDKKVEGLSKHIKLEEERRSEDAQSKAALTDWLRAKASFVIEGLKEADKDEFCRCELKLQKWYGDLRGKPFAIEAENSILDISGFSKQYNCAFIWQKDGVKKLNLYLIINYFKGGKLRFKKIKPEAFEANRFYTVINKKSGEIVPMEVNFNFDDPNLIILPLAFGKRQGREFIWNDLLSLETGSLKLANGRVIEKTLYNRRTRQDEPALFVALTFERREVLDSSNIKPMNLIGVDRGENIPAVIALTDPEGCPLSRFKDSLGNPTHILRIGESYKEKQRTIQAKKEVEQRRAGGYSRKYASKAKNLADDMVRNTARDLLYYAVTQDAMLIFENLSRGFGRQGKRTFMAERQYTRMEDWLTAKLAYEGLPSKTYLSKTLAQYTSKTCSNCGFTITSADYDRVLEKLKKTATGWMTTINGKELKVEGQITYYNRYKRQNVVKDLSVELDRLSEESVNNDISSWTKGRSGEALSLLKKRFSHRPVQEKFVCLNCGFETHADEQAALNIARSWLFLRSQEYKKYQTNKTTGNTDKRAFVETWQSFYRKKLKEVWKPAV

SEQ ID NO: 220 - protein, 978 aa, synthetic construct
QEIKRINKIRRRLVKDSNTKKAGKTGPMKTLLVRVMTPDLRERLENLRKKPENIPQPISNTSRANLNKLLTDYTEMKKAILHVYWEEFQKDPVGLMSRVAQPASKKIDQNKLKPEMDEKGNLTTAGFACSQCGQPLFVYKLEQVSEKGKAYTNYFGRCNVAEHEKLILLAQLKPEKDSDEAVTYSLGKFGQRALDFYSIHVTKESTHPVKPLAQIAGNRYASGPVGKALSDACMGTIASFLSKYQDIIIEHQKVVKGNQKRLESLRELAGKENLEYPSVTLPPQPHTKEGVDAYNEVIARVRTWVNLNLWQKLKLSRDDAKPLLRLKGFPSFPLVERQANEVDWWDMVCNVKKLINEKKEDGKVFWQNLAGYKRQEALRPYLSSEEDRKKGKKFARYQLGDLLLHLEKKHGEDWGKVYDEAWERIDKKVEGLSKHIKLEEERRSEDAQSKAALTDWLRAKASFVIEGLKEADKDEFCRCELKLQKWYGDLRGKPFAIEAENSILDISGFSKQYNCAFIWQKDGVKKLNLYLIINYFKGGKLRFKKIKPEAFEANRFYTVINKKSGEIVPMEVNFNFDDPNLIILPLAFGKRQGREFIWNDLLSLETGSLKLANGRVIEKTLYNRRTRQDEPALFVALTFERREVLDSSNIKPMNLIGVDRGENIPAVIALTDPEGCPLSRFKDSLGNPTHILRIGESYKEKQRTIQAKKEVEQRRAGGYSRKYASKAKNLADDMVRNTARDLLYYAVTQDAMLIFENLSRGFGRQGKRTFMAERQYTRMEDWLTAKLAYEGLPSKTYLSKTLAQYTSKTCSNCGFTITSADYDRVLEKLKKTATGWMTTINGKELKVEGQITYYNRYKRQNVVKDLSVELDRLSEESVNNDISSWTKGRSGEALSLLKKRFSHRPVQEKFVCLNCGFETHADEQAALNIARSWLFLRSQEYKKYQTNKTTGNTDKRAFVETWQSFYRKKLKEVWKPAV

SEQ ID NO: 221 - protein, 978 aa, synthetic construct
QEIKRINKIRRRLVKDSNTKKAGKTGPMKTLLVRVMTPDLRERLENLRKKPENIPQPISNTSRANLNKLLTDYTEMKKAILHVYWEEFQKDPVGLMSRVAQPASKKIDQNKLKPEMDEKGNLTTAGFACSQCGQPLFVYKLEQVSEKGKAYTNYFGRCNVAEHEKLILLAQLKPEKDSDEAVTYSLGKFGQRALDFYSIHVTKESTHPVKPLAQIAGNRYASGPVGKALSDACMGTIASFLSKYQDIIIEHQKVVKGNQKRLESLRELAGKENLEYPSVTLPPQPHTKEGVDAYNEVIARVRWWVNLNLWQKLKLSRDDAKPLLRLKGFPSFPLVERQANEVDWWDMVCNVKKLINEKKEDGKVFWQNLAGYKRQEALRPYLSSEEDRKKGKKFARYQLGDLLLHLEKKHGEDWGKVYDEAWERIDKKVEGLSKHIKLEEERRSEDAQSKAALTDWLRAKASFVIEGLKEADKDEFCRCELKLQKWYGDLRGKPFAIEAENSILDISGFSKQYNCAFIWQKDGVKKLNLYLIINYFKGGKLRFKKIKPEAFEANRFYTVINKKSGEIVPMEVNFNFDDPNLIILPLAFGKRQGREFIWNDLLSLETGSLKLANGRVIEKTLYNRRTRQDEPALFVALTFERREVLDSSNIKPMNLIGVDRGENIPAVIALTDPEGCPLSRFKDSLGNPTHILRIGESYKEKQRTIQAKKEVEQRRAGGYSRKYASKAKNLADDMVRNTARDLLYYAVTQDAMLIFENLSRGFGRQGKRTFMAERQYTRMEDWLTAKLAYEGLPSKTYLSKTLAQYTSKTCSNCGFTITSADYDRVLEKLKKTATGWMTTINGKELKVEGQITYYNRYKRQNVVKDLSVELDRLSEESVNNDISSWTKGRSGEALSLLKKRFSHRPVQEKFVCLNCGFETHADEQAALNIARSWLFLRSQEYKKYQTNKTTGNTDKRAFVETWQSFYRKKLKEVWKPAV

SEQ ID NO: 222 - protein, 978 aa, synthetic construct
QEIKRINKIRRRLVKDSNTKKAGKTGPMKTLLVRVMTPDLRERLENLRKKPENIPQPISNTSRANLNKLLTDYTEMKKAILHVYWEEFQKDPVGLMSRVAQPASKKIDQNKLKPEMDEKGNLTTAGFACSQCGQPLFVYKLEQVSEKGKAYTNYFGRCNVAEHEKLILLAQLKPEKDSDEAVTYSLGKFGQRALDFYSIHVTKESTHPVKPLAQIAGNRYASGPVGKALSDACMGTIASFLSKYQDIIIEHQKVVKGNQKRLESLRELAGKENLEYPSVTLPPQPHTKEGVDAYNEVIARVRMWVNLNLWQKLKLSRDDAKPLLRLKNFPSFPLVERQANEVDWWDMVCNVKKLINEKKEDGKVFWQNLAGYKRQEALRPYLSSEEDRKKGKKFARYQLGDLLLHLEKKHGEDWGKVYDEAWERIDKKVEGLSKHIKLEEERRSEDAQSKAALTDWLRAKASFVIEGLKEADKDEFCRCELKLQKWYGDLRGKPFAIEAENSILDISGFSKQYNCAFIWQKDGVKKLNLYLIINYFKGGKLRFKKIKPEAFEANRFYTVINKKSGEIVPMEVNFNFDDPNLIILPLAFGKRQGREFIWNDLLSLETGSLKLANGRVIEKTLYNRRTRQDEPALFVALTFERREVLDSSNIKPMNLIGVDRGENIPAVIALTDPEGCPLSRFKDSLGNPTHILRIGESYKEKQRTIQAKKEVEQRRAGGYSRKYASKAKNLADDMVRNTARDLLYYAVTQDAMLIFENLSRGFGRQGKRTFMAERQYTRMEDWLTAKLAYEGLPSKTYLSKTLAQYTSKTCSNCGFTITSADYDRVLEKLKKTATGWMTTINGKELKVEGQITYYNRYKRQNVVKDLSVELDRLSEESVNNDISSWTKGRSGEALSLLKKRFSHRPVQEKFVCLNCGFETHADEQAALNIARSWLFLRSQEYKKYQTNKTTGNTDKRAFVETWQSFYRKKLKEVWKPAV

SEQ ID NO: 223 - protein, 978 aa, synthetic construct
QEIKRINKIRRRLVKDSNTKKAGKTGPMKTLLVRVMTPDLRERLENLRKKPENIPQPISNTSRANLNKLLTDYTEMKKAILHVYWEEFQKDPVGLMSRVAQPASKKIDQNKLKPEMDEKGNLTTAGFACSQCGQPLFVYKLEQVSEKGKAYTNYFGRCNVAEHEKLILLAQLKPEKDSDEAVTYSLGKFGQRALDFYSIHVTKESTHPVKPLAQIAGNRYASGPVGKALSDACMGTIASFLSKYQDIIIEHQKVVKGNQKRLESLRELAGKENLEYPSVTLPPQPHTKEGVDAYNEVIARVRMWVNLNLWQKLKLSRDDAKPLLRLKGFPQFPLVERQANEVDWWDMVCNVKKLINEKKEDGKVFWQNLAGYKRQEALRPYLSSEEDRKKGKKFARYQLGDLLLHLEKKHGEDWGKVYDEAWERIDKKVEGLSKHIKLEEERRSEDAQSKAALTDWLRAKASFVIEGLKEADKDEFCRCELKLQKWYGDLRGKPFAIEAENSILDISGFSKQYNCAFIWQKDGVKKLNLYLIINYFKGGKLRFKKIKPEAFEANRFYTVINKKSGEIVPMEVNFNFDDPNLIILPLAFGKRQGREFIWNDLLSLETGSLKLANGRVIEKTLYNRRTRQDEPALFVALTFERREVLDSSNIKPMNLIGVDRGENIPAVIALTDPEGCPLSRFKDSLGNPTHILRIGESYKEKQRTIQAKKEVEQRRAGGYSRKYASKAKNLADDMVRNTARDLLYYAVTQDAMLIFENLSRGFGRQGKRTFMAERQYTRMEDWLTAKLAYEGLPSKTYLSKTLAQYTSKTCSNCGFTITSADYDRVLEKLKKTATGWMTTINGKELKVEGQITYYNRYKRQNVVKDLSVELDRLSEESVNNDISSWTKGRSGEALSLLKKRFSHRPVQEKFVCLNCGFETHADEQAALNIARSWLFLRSQEYKKYQTNKTTGNTDKRAFVETWQSFYRKKLKEVWKPAV

SEQ ID NO: 224 - protein, 979 aa, synthetic construct
QEIKRINKIRRRLVKDSNTKKAGKTGPMKTLLVRVMTPDLRERLENLRKKPENIPQPISNTSRANLNKLLTDYTEMKKAILHVYWEEFQKDPVGLMSRVAQPASKKIDQNKLKPEMDEKGNLTTAGFACSQCGQPLFVYKLEQVSEKGKAYTNYFGRCNVAEHEKLILLAQLKPEKDSDEAVTYSLGKFGQRALDFYSIHVTKESTHPVKPLAQIAGNRYASGPVGKALSDACMGTIASFLSKYQDIIIEHQKVVKGNQKRLESLRELAGKENLEYPSVTLPPQPHTKEGVDAYNEVIARVRMWVNLNLWQKLKLSRDDAKPLLRLKGFPSFPALVERQANEVDWWDMVCNVKKLINEKKEDGKVFWQNLAGYKRQEALRPYLSSEEDRKKGKKFARYQLGDLLLHLEKKHGEDWGKVYDEAWERIDKKVEGLSKHIKLEEERRSEDAQSKAALTDWLRAKASFVIEGLKEADKDEFCRCELKLQKWYGDLRGKPFAIEAENSILDISGFSKQYNCAFIWQKDGVKKLNLYLIINYFKGGKLRFKKIKPEAFEANRFYTVINKKSGEIVPMEVNFNFDDPNLIILPLAFGKRQGREFIWNDLLSLETGSLKLANGRVIEKTLYNRRTRQDEPALFVALTFERREVLDSSNIKPMNLIGVDRGENIPAVIALTDPEGCPLSRFKDSLGNPTHILRIGESYKEKQRTIQAKKEVEQRRAGGYSRKYASKAKNLADDMVRNTARDLLYYAVTQDAMLIFENLSRGFGRQGKRTFMAERQYTRMEDWLTAKLAYEGLPSKTYLSKTLAQYTSKTCSNCGFTITSADYDRVLEKLKKTATGWMTTINGKELKVEGQITYYNRYKRQNVVKDLSVELDRLSEESVNNDISSWTKGRSGEALSLLKKRFSHRPVQEKFVCLNCGFETHADEQAALNIARSWLFLRSQEYKKYQTNKTTGNTDKRAFVETWQSFYRKKLKEVWKPAV

SEQ ID NO: 225 - protein, 977 aa, synthetic construct
QEIKRINKIRRRLVKDSNTKKAGKTGPMKTLLVRVMTPDLRERLENLRKKPENIPQPISNTSRANLNKLLTDYTEMKKAILHVYWEEFQKDPVGLMSRVAQPASKKIDQNKLKPEMDEKGNLTTAGFACSQCGQPLFVYKLEQVSEKGKAYTNYFGRCNVAEHEKLILLAQLKPEKDSDEAVTYSLGKFGQRALDFYSIHVTKESTHPVKPLAQIAGNRYASGPVGKALSDACMGTIASFLSKYQDIIIEHQKVVKGNQKRLESLRELAGKENLEYPSVTLPPQPHTKEGVDAYNEVIARVRMWVNLNLWQKLKLSRDDAKPLLRLKGFPSFPLERQANEVDWWDMVCNVKKLINEKKEDGKVFWQNLAGYKRQEALRPYLSSEEDRKKGKKFARYQLGDLLLHLEKKHGEDWGKVYDEAWERIDKKVEGLSKHIKLEEERRSEDAQSKAALTDWLRAKASFVIEGLKEADKDEFCRCELKLQKWYGDLRGKPFAIEAENSILDISGFSKQYNCAFIWQKDGVKKLNLYLIINYFKGGKLRFKKIKPEAFEANRFYTVINKKSGEIVPMEVNFNFDDPNLIILPLAFGKRQGREFIWNDLLSLETGSLKLANGRVIEKTLYNRRTRQDEPALFVALTFERREVLDSSNIKPMNLIGVDRGENIPAVIALTDPEGCPLSRFKDSLGNPTHILRIGESYKEKQRTIQAKKEVEQRRAGGYSRKYASKAKNLADDMVRNTARDLLYYAVTQDAMLIFENLSRGFGRQGKRTFMAERQYTRMEDWLTAKLAYEGLPSKTYLSKTLAQYTSKTCSNCGFTITSADYDRVLEKLKKTATGWMTTINGKELKVEGQITYYNRYKRQNVVKDLSVELDRLSEESVNNDISSWTKGRSGEALSLLKKRFSHRPVQEKFVCLNCGFETHADEQAALNIARSWLFLRSQEYKKYQTNKTTGNTDKRAFVETWQSFYRKKLKEVWKPAV

SEQ ID NO: 226 - protein, 978 aa, synthetic construct
QEIKRINKIRRRLVKDSNTKKAGKTGPMKTLLVRVMTPDLRERLENLRKKPENIPQPISNTSRANLNKLLTDYTEMKKAILHVYWEEFQKDPVGLMSRVAQPASKKIDQNKLKPEMDEKGNLTTAGFACSQCGQPLFVYKLEQVSEKGKAYTNYFGRCNVAEHEKLILLAQLKPEKDSDEAVTYSLGKFGQRALDFYSIHVTKESTHPVKPLAQIAGNRYASGPVGKALSDACMGTIASFLSKYQDIIIEHQKVVKGNQKRLESLRELAGKENLEYPSVTLPPQPHTKEGVDAYNEVIARVRMWVNLNLWQKLKLSRDDAKPLLRLKGFPSFPLVPRQANEVDWWDMVCNVKKLINEKKEDGKVFWQNLAGYKRQEALRPYLSSEEDRKKGKKFARYQLGDLLLHLEKKHGEDWGKVYDEAWERIDKKVEGLSKHIKLEEERRSEDAQSKAALTDWLRAKASFVIEGLKEADKDEFCRCELKLQKWYGDLRGKPFAIEAENSILDISGFSKQYNCAFIWQKDGVKKLNLYLIINYFKGGKLRFKKIKPEAFEANRFYTVINKKSGEIVPMEVNFNFDDPNLIILPLAFGKRQGREFIWNDLLSLETGSLKLANGRVIEKTLYNRRTRQDEPALFVALTFERREVLDSSNIKPMNLIGVDRGENIPAVIALTDPEGCPLSRFKDSLGNPTHILRIGESYKEKQRTIQAKKEVEQRRAGGYSRKYASKAKNLADDMVRNTARDLLYYAVTQDAMLIFENLSRGFGRQGKRTFMAERQYTRMEDWLTAKLAYEGLPSKTYLSKTLAQYTSKTCSNCGFTITSADYDRVLEKLKKTATGWMTTINGKELKVEGQITYYNRYKRQNVVKDLSVELDRLSEESVNNDISSWTKGRSGEALSLLKKRFSHRPVQEKFVCLNCGFETHADEQAALNIARSWLFLRSQEYKKYQTNKTTGNTDKRAFVETWQSFYRKKLKEVWKPAV

SEQ ID NO: 227 - protein, 977 aa, synthetic construct
QEIKRINKIRRRLVKDSNTKKAGKTGPMKTLLVRVMTPDLRERLENLRKKPENIPQPISNTSRANLNKLLTDYTEMKKAILHVYWEEFQKDPVGLMSRVAQPASKKIDQNKLKPEMDEKGNLTTAGFACSQCGQPLFVYKLEQVSEKGKAYTNYFGRCNVAEHEKLILLAQLKPEKDSDEAVTYSLGKFGQRALDFYSIHVTKESTHPVKPLAQIAGNRYASGPVGKALSDACMGTIASFLSKYQDIIIEHQKVVKGNQKRLESLRELAGKENLEYPSVTLPPQPHTKEGVDAYNEVIARVRMWVNLNLWQKLKLSRDDAKPLLRLKGFPSFPLVRQANEVDWWDMVCNVKKLINEKKEDGKVFWQNLAGYKRQEALRPYLSSEEDRKKGKKFARYQLGDLLLHLEKKHGEDWGKVYDEAWERIDKKVEGLSKHIKLEEERRSEDAQSKAALTDWLRAKASFVIEGLKEADKDEFCRCELKLQKWYGDLRGKPFAIEAENSILDISGFSKQYNCAFIWQKDGVKKLNLYLIINYFKGGKLRFKKIKPEAFEANRFYTVINKKSGEIVPMEVNFNFDDPNLIILPLAFGKRQGREFIWNDLLSLETGSLKLANGRVIEKTLYNRRTRQDEPALFVALTFERREVLDSSNIKPMNLIGVDRGENIPAVIALTDPEGCPLSRFKDSLGNPTHILRIGESYKEKQRTIQAKKEVEQRRAGGYSRKYASKAKNLADDMVRNTARDLLYYAVTQDAMLIFENLSRGFGRQGKRTFMAERQYTRMEDWLTAKLAYEGLPSKTYLSKTLAQYTSKTCSNCGFTITSADYDRVLEKLKKTATGWMTTINGKELKVEGQITYYNRYKRQNVVKDLSVELDRLSEESVNNDISSWTKGRSGEALSLLKKRFSHRPVQEKFVCLNCGFETHADEQAALNIARSWLFLRSQEYKKYQTNKTTGNTDKRAFVETWQSFYRKKLKEVWKPAV

SEQ ID NO: 228 - protein, 978 aa, synthetic construct
QEIKRINKIRRRLVKDSNTKKAGKTGPMKTLLVRVMTPDLRERLENLRKKPENIPQPISNTSRANLNKLLTDYTEMKKAILHVYWEEFQKDPVGLMSRVAQPASKKIDQNKLKPEMDEKGNLTTAGFACSQCGQPLFVYKLEQVSEKGKAYTNYFGRCNVAEHEKLILLAQLKPEKDSDEAVTYSLGKFGQRALDFYSIHVTKESTHPVKPLAQIAGNRYASGPVGKALSDACMGTIASFLSKYQDIIIEHQKVVKGNQKRLESLRELAGKENLEYPSVTLPPQPHTKEGVDAYNEVIARVRMWVNLNLWQKLKLSRDDAKPLLRLKGFPSFPLVLRQANEVDWWDMVCNVKKLINEKKEDGKVFWQNLAGYKRQEALRPYLSSEEDRKKGKKFARYQLGDLLLHLEKKHGEDWGKVYDEAWERIDKKVEGLSKHIKLEEERRSEDAQSKAALTDWLRAKASFVIEGLKEADKDEFCRCELKLQKWYGDLRGKPFAIEAENSILDISGFSKQYNCAFIWQKDGVKKLNLYLIINYFKGGKLRFKKIKPEAFEANRFYTVINKKSGEIVPMEVNFNFDDPNLIILPLAFGKRQGREFIWNDLLSLETGSLKLANGRVIEKTLYNRRTRQDEPALFVALTFERREVLDSSNIKPMNLIGVDRGENIPAVIALTDPEGCPLSRFKDSLGNPTHILRIGESYKEKQRTIQAKKEVEQRRAGGYSRKYASKAKNLADDMVRNTARDLLYYAVTQDAMLIFENLSRGFGRQGKRTFMAERQYTRMEDWLTAKLAYEGLPSKTYLSKTLAQYTSKTCSNCGFTITSADYDRVLEKLKKTATGWMTTINGKELKVEGQITYYNRYKRQNVVKDLSVELDRLSEESVNNDISSWTKGRSGEALSLLKKRFSHRPVQEKFVCLNCGFETHADEQAALNIARSWLFLRSQEYKKYQTNKTTGNTDKRAFVETWQSFYRKKLKEVWKPAV

SEQ ID NO: 229 - protein, 978 aa, synthetic construct
QEIKRINKIRRRLVKDSNTKKAGKTGPMKTLLVRVMTPDLRERLENLRKKPENIPQPISNTSRANLNKLLTDYTEMKKAILHVYWEEFQKDPVGLMSRVAQPASKKIDQNKLKPEMDEKGNLTTAGFACSQCGQPLFVYKLEQVSEKGKAYTNYFGRCNVAEHEKLILLAQLKPEKDSDEAVTYSLGKFGQRALDFYSIHVTKESTHPVKPLAQIAGNRYASGPVGKALSDACMGTIASFLSKYQDIIIEHQKVVKGNQKRLESLRELAGKENLEYPSVTLPPQPHTKEGVDAYNEVIARVRMWVNLNLWQKLKLSRDDAKPLLRLKGFPSFPLVRRQANEVDWWDMVCNVKKLINEKKEDGKVFWQNLAGYKRQEALRPYLSSEEDRKKGKKFARYQLGDLLLHLEKKHGEDWGKVYDEAWERIDKKVEGLSKHIKLEEERRSEDAQSKAALTDWLRAKASFVIEGLKEADKDEFCRCELKLQKWYGDLRGKPFAIEAENSILDISGFSKQYNCAFIWQKDGVKKLNLYLIINYFKGGKLRFKKIKPEAFEANRFYTVINKKSGEIVPMEVNFNFDDPNLIILPLAFGKRQGREFIWNDLLSLETGSLKLANGRVIEKTLYNRRTRQDEPALFVALTFERREVLDSSNIKPMNLIGVDRGENIPAVIALTDPEGCPLSRFKDSLGNPTHILRIGESYKEKQRTIQAKKEVEQRRAGGYSRKYASKAKNLADDMVRNTARDLLYYAVTQDAMLIFENLSRGFGRQGKRTFMAERQYTRMEDWLTAKLAYEGLPSKTYLSKTLAQYTSKTCSNCGFTITSADYDRVLEKLKKTATGWMTTINGKELKVEGQITYYNRYKRQNVVKDLSVELDRLSEESVNNDISSWTKGRSGEALSLLKKRFSHRPVQEKFVCLNCGFETHADEQAALNIARSWLFLRSQEYKKYQTNKTTGNTDKRAFVETWQSFYRKKLKEVWKPAV

SEQ ID NO: 230 - protein, 979 aa, synthetic construct
QEIKRINKIRRRLVKDSNTKKAGKTGPMKTLLVRVMTPDLRERLENLRKKPENIPQPISNTSRANLNKLLTDYTEMKKAILHVYWEEFQKDPVGLMSRVAQPASKKIDQNKLKPEMDEKGNLTTAGFACSQCGQPLFVYKLEQVSEKGKAYTNYFGRCNVAEHEKLILLAQLKPEKDSDEAVTYSLGKFGQRALDFYSIHVTKESTHPVKPLAQIAGNRYASGPVGKALSDACMGTIASFLSKYQDIIIEHQKVVKGNQKRLESLRELAGKENLEYPSVTLPPQPHTKEGVDAYNEVIARVRMWVNLNLWQKLKLSRDDAKPLLRLKGFPSFPLVERQQANEVDWWDMVCNVKKLINEKKEDGKVFWQNLAGYKRQEALRPYLSSEEDRKKGKKFARYQLGDLLLHLEKKHGEDWGKVYDEAWERIDKKVEGLSKHIKLEEERRSEDAQSKAALTDWLRAKASFVIEGLKEADKDEFCRCELKLQKWYGDLRGKPFAIEAENSILDISGFSKQYNCAFIWQKDGVKKLNLYLIINYFKGGKLRFKKIKPEAFEANRFYTVINKKSGEIVPMEVNFNFDDPNLIILPLAFGKRQGREFIWNDLLSLETGSLKLANGRVIEKTLYNRRTRQDEPALFVALTFERREVLDSSNIKPMNLIGVDRGENIPAVIALTDPEGCPLSRFKDSLGNPTHILRIGESYKEKQRTIQAKKEVEQRRAGGYSRKYASKAKNLADDMVRNTARDLLYYAVTQDAMLIFENLSRGFGRQGKRTFMAERQYTRMEDWLTAKLAYEGLPSKTYLSKTLAQYTSKTCSNCGFTITSADYDRVLEKLKKTATGWMTTINGKELKVEGQITYYNRYKRQNVVKDLSVELDRLSEESVNNDISSWTKGRSGEALSLLKKRFSHRPVQEKFVCLNCGFETHADEQAALNIARSWLFLRSQEYKKYQTNKTTGNTDKRAFVETWQSFYRKKLKEVWKPAV

SEQ ID NO: 231 - protein, 979 aa, synthetic construct
QEIKRINKIRRRLVKDSNTKKAGKTGPMKTLLVRVMTPDLRERLENLRKKPENIPQPISNTSRANLNKLLTDYTEMKKAILHVYWEEFQKDPVGLMSRVAQPASKKIDQNKLKPEMDEKGNLTTAGFACSQCGQPLFVYKLEQVSEKGKAYTNYFGRCNVAEHEKLILLAQLKPEKDSDEAVTYSLGKFGQRALDFYSIHVTKESTHPVKPLAQIAGNRYASGPVGKALSDACMGTIASFLSKYQDIIIEHQKVVKGNQKRLESLRELAGKENLEYPSVTLPPQPHTKEGVDAYNEVIARVRMWVNLNLWQKLKLSRDDAKPLLRLKGFPSFPLVERQANHEVDWWDMVCNVKKLINEKKEDGKVFWQNLAGYKRQEALRPYLSSEEDRKKGKKFARYQLGDLLLHLEKKHGEDWGKVYDEAWERIDKKVEGLSKHIKLEEERRSEDAQSKAALTDWLRAKASFVIEGLKEADKDEFCRCELKLQKWYGDLRGKPFAIEAENSILDISGFSKQYNCAFIWQKDGVKKLNLYLIINYFKGGKLRFKKIKPEAFEANRFYTVINKKSGEIVPMEVNFNFDDPNLIILPLAFGKRQGREFIWNDLLSLETGSLKLANGRVIEKTLYNRRTRQDEPALFVALTFERREVLDSSNIKPMNLIGVDRGENIPAVIALTDPEGCPLSRFKDSLGNPTHILRIGESYKEKQRTIQAKKEVEQRRAGGYSRKYASKAKNLADDMVRNTARDLLYYAVTQDAMLIFENLSRGFGRQGKRTFMAERQYTRMEDWLTAKLAYEGLPSKTYLSKTLAQYTSKTCSNCGFTITSADYDRVLEKLKKTATGWMTTINGKELKVEGQITYYNRYKRQNVVKDLSVELDRLSEESVNNDISSWTKGRSGEALSLLKKRFSHRPVQEKFVCLNCGFETHADEQAALNIARSWLFLRSQEYKKYQTNKTTGNTDKRAFVETWQSFYRKKLKEVWKPAV

SEQ ID NO: 232 - protein, 979 aa, synthetic construct
QEIKRINKIRRRLVKDSNTKKAGKTGPMKTLLVRVMTPDLRERLENLRKKPENIPQPISNTSRANLNKLLTDYTEMKKAILHVYWEEFQKDPVGLMSRVAQPASKKIDQNKLKPEMDEKGNLTTAGFACSQCGQPLFVYKLEQVSEKGKAYTNYFGRCNVAEHEKLILLAQLKPEKDSDEAVTYSLGKFGQRALDFYSIHVTKESTHPVKPLAQIAGNRYASGPVGKALSDACMGTIASFLSKYQDIIIEHQKVVKGNQKRLESLRELAGKENLEYPSVTLPPQPHTKEGVDAYNEVIARVRMWVNLNLWQKLKLSRDDAKPLLRLKGFPSFPLVERQANAEVDWWDMVCNVKKLINEKKEDGKVFWQNLAGYKRQEALRPYLSSEEDRKKGKKFARYQLGDLLLHLEKKHGEDWGKVYDEAWERIDKKVEGLSKHIKLEEERRSEDAQSKAALTDWLRAKASFVIEGLKEADKDEFCRCELKLQKWYGDLRGKPFAIEAENSILDISGFSKQYNCAFIWQKDGVKKLNLYLIINYFKGGKLRFKKIKPEAFEANRFYTVINKKSGEIVPMEVNFNFDDPNLIILPLAFGKRQGREFIWNDLLSLETGSLKLANGRVIEKTLYNRRTRQDEPALFVALTFERREVLDSSNIKPMNLIGVDRGENIPAVIALTDPEGCPLSRFKDSLGNPTHILRIGESYKEKQRTIQAKKEVEQRRAGGYSRKYASKAKNLADDMVRNTARDLLYYAVTQDAMLIFENLSRGFGRQGKRTFMAERQYTRMEDWLTAKLAYEGLPSKTYLSKTLAQYTSKTCSNCGFTITSADYDRVLEKLKKTATGWMTTINGKELKVEGQITYYNRYKRQNVVKDLSVELDRLSEESVNNDISSWTKGRSGEALSLLKKRFSHRPVQEKFVCLNCGFETHADEQAALNIARSWLFLRSQEYKKYQTNKTTGNTDKRAFVETWQSFYRKKLKEVWKPAV

SEQ ID NO: 233 - protein, 979 aa, synthetic construct
QEIKRINKIRRRLVKDSNTKKAGKTGPMKTLLVRVMTPDLRERLENLRKKPENIPQPISNTSRANLNKLLTDYTEMKKAILHVYWEEFQKDPVGLMSRVAQPASKKIDQNKLKPEMDEKGNLTTAGFACSQCGQPLFVYKLEQVSEKGKAYTNYFGRCNVAEHEKLILLAQLKPEKDSDEAVTYSLGKFGQRALDFYSIHVTKESTHPVKPLAQIAGNRYASGPVGKALSDACMGTIASFLSKYQDIIIEHQKVVKGNQKRLESLRELAGKENLEYPSVTLPPQPHTKEGVDAYNEVIARVRMWVNLNLWQKLKLSRDDAKPLLRLKGFPSFPLVERQANEVDDWWDMVCNVKKLINEKKEDGKVFWQNLAGYKRQEALRPYLSSEEDRKKGKKFARYQLGDLLLHLEKKHGEDWGKVYDEAWERIDKKVEGLSKHIKLEEERRSEDAQSKAALTDWLRAKASFVIEGLKEADKDEFCRCELKLQKWYGDLRGKPFAIEAENSILDISGFSKQYNCAFIWQKDGVKKLNLYLIINYFKGGKLRFKKIKPEAFEANRFYTVINKKSGEIVPMEVNFNFDDPNLIILPLAFGKRQGREFIWNDLLSLETGSLKLANGRVIEKTLYNRRTRQDEPALFVALTFERREVLDSSNIKPMNLIGVDRGENIPAVIALTDPEGCPLSRFKDSLGNPTHILRIGESYKEKQRTIQAKKEVEQRRAGGYSRKYASKAKNLADDMVRNTARDLLYYAVTQDAMLIFENLSRGFGRQGKRTFMAERQYTRMEDWLTAKLAYEGLPSKTYLSKTLAQYTSKTCSNCGFTITSADYDRVLEKLKKTATGWMTTINGKELKVEGQITYYNRYKRQNVVKDLSVELDRLSEESVNNDISSWTKGRSGEALSLLKKRFSHRPVQEKFVCLNCGFETHADEQAALNIARSWLFLRSQEYKKYQTNKTTGNTDKRAFVETWQSFYRKKLKEVWKPAV

SEQ ID NO: 234 - protein, 979 aa, synthetic construct
QEIKRINKIRRRLVKDSNTKKAGKTGPMKTLLVRVMTPDLRERLENLRKKPENIPQPISNTSRANLNKLLTDYTEMKKAILHVYWEEFQKDPVGLMSRVAQPASKKIDQNKLKPEMDEKGNLTTAGFACSQCGQPLFVYKLEQVSEKGKAYTNYFGRCNVAEHEKLILLAQLKPEKDSDEAVTYSLGKFGQRALDFYSIHVTKESTHPVKPLAQIAGNRYASGPVGKALSDACMGTIASFLSKYQDIIIEHQKVVKGNQKRLESLRELAGKENLEYPSVTLPPQPHTKEGVDAYNEVIARVRMWVNLNLWQKLKLSRDDAKPLLRLKGFPSFPLVERQANEVDWWPDMVCNVKKLINEKKEDGKVFWQNLAGYKRQEALRPYLSSEEDRKKGKKFARYQLGDLLLHLEKKHGEDWGKVYDEAWERIDKKVEGLSKHIKLEEERRSEDAQSKAALTDWLRAKASFVIEGLKEADKDEFCRCELKLQKWYGDLRGKPFAIEAENSILDISGFSKQYNCAFIWQKDGVKKLNLYLIINYFKGGKLRFKKIKPEAFEANRFYTVINKKSGEIVPMEVNFNFDDPNLIILPLAFGKRQGREFIWNDLLSLETGSLKLANGRVIEKTLYNRRTRQDEPALFVALTFERREVLDSSNIKPMNLIGVDRGENIPAVIALTDPEGCPLSRFKDSLGNPTHILRIGESYKEKQRTIQAKKEVEQRRAGGYSRKYASKAKNLADDMVRNTARDLLYYAVTQDAMLIFENLSRGFGRQGKRTFMAERQYTRMEDWLTAKLAYEGLPSKTYLSKTLAQYTSKTCSNCGFTITSADYDRVLEKLKKTATGWMTTINGKELKVEGQITYYNRYKRQNVVKDLSVELDRLSEESVNNDISSWTKGRSGEALSLLKKRFSHRPVQEKFVCLNCGFETHADEQAALNIARSWLFLRSQEYKKYQTNKTTGNTDKRAFVETWQSFYRKKLKEVWKPAV

SEQ ID NO: 235 - protein, 978 aa, synthetic construct
QEIKRINKIRRRLVKDSNTKKAGKTGPMKTLLVRVMTPDLRERLENLRKKPENIPQPISNTSRANLNKLLTDYTEMKKAILHVYWEEFQKDPVGLMSRVAQPASKKIDQNKLKPEMDEKGNLTTAGFACSQCGQPLFVYKLEQVSEKGKAYTNYFGRCNVAEHEKLILLAQLKPEKDSDEAVTYSLGKFGQRALDFYSIHVTKESTHPVKPLAQIAGNRYASGPVGKALSDACMGTIASFLSKYQDIIIEHQKVVKGNQKRLESLRELAGKENLEYPSVTLPPQPHTKEGVDAYNEVIARVRMWVNLNLWQKLKLSRDDAKPLLRLKGFPSFPLVERQANEVDWWDMVCNVKKLINEKKEDGKVFWQNLAGYKRQEALRPYLSSEEDRKKGKKFARTQLGDLLLHLEKKHGEDWGKVYDEAWERIDKKVEGLSKHIKLEEERRSEDAQSKAALTDWLRAKASFVIEGLKEADKDEFCRCELKLQKWYGDLRGKPFAIEAENSILDISGFSKQYNCAFIWQKDGVKKLNLYLIINYFKGGKLRFKKIKPEAFEANRFYTVINKKSGEIVPMEVNFNFDDPNLIILPLAFGKRQGREFIWNDLLSLETGSLKLANGRVIEKTLYNRRTRQDEPALFVALTFERREVLDSSNIKPMNLIGVDRGENIPAVIALTDPEGCPLSRFKDSLGNPTHILRIGESYKEKQRTIQAKKEVEQRRAGGYSRKYASKAKNLADDMVRNTARDLLYYAVTQDAMLIFENLSRGFGRQGKRTFMAERQYTRMEDWLTAKLAYEGLPSKTYLSKTLAQYTSKTCSNCGFTITSADYDRVLEKLKKTATGWMTTINGKELKVEGQITYYNRYKRQNVVKDLSVELDRLSEESVNNDISSWTKGRSGEALSLLKKRFSHRPVQEKFVCLNCGFETHADEQAALNIARSWLFLRSQEYKKYQTNKTTGNTDKRAFVETWQSFYRKKLKEVWKPAV

SEQ ID NO: 236 - protein, 978 aa, synthetic construct
QEIKRINKIRRRLVKDSNTKKAGKTGPMKTLLVRVMTPDLRERLENLRKKPENIPQPISNTSRANLNKLLTDYTEMKKAILHVYWEEFQKDPVGLMSRVAQPASKKIDQNKLKPEMDEKGNLTTAGFACSQCGQPLFVYKLEQVSEKGKAYTNYFGRCNVAEHEKLILLAQLKPEKDSDEAVTYSLGKFGQRALDFYSIHVTKESTHPVKPLAQIAGNRYASGPVGKALSDACMGTIASFLSKYQDIIIEHQKVVKGNQKRLESLRELAGKENLEYPSVTLPPQPHTKEGVDAYNEVIARVRMWVNLNLWQKLKLSRDDAKPLLRLKGFPSFPLVERQANEVDWWDMVCNVKKLINEKKEDGKVFWQNLAGYKRQEALRPYLSSEEDRKKGKKFARYQLMDLLLHLEKKHGEDWGKVYDEAWERIDKKVEGLSKHIKLEEERRSEDAQSKAALTDWLRAKASFVIEGLKEADKDEFCRCELKLQKWYGDLRGKPFAIEAENSILDISGFSKQYNCAFIWQKDGVKKLNLYLIINYFKGGKLRFKKIKPEAFEANRFYTVINKKSGEIVPMEVNFNFDDPNLIILPLAFGKRQGREFIWNDLLSLETGSLKLANGRVIEKTLYNRRTRQDEPALFVALTFERREVLDSSNIKPMNLIGVDRGENIPAVIALTDPEGCPLSRFKDSLGNPTHILRIGESYKEKQRTIQAKKEVEQRRAGGYSRKYASKAKNLADDMVRNTARDLLYYAVTQDAMLIFENLSRGFGRQGKRTFMAERQYTRMEDWLTAKLAYEGLPSKTYLSKTLAQYTSKTCSNCGFTITSADYDRVLEKLKKTATGWMTTINGKELKVEGQITYYNRYKRQNVVKDLSVELDRLSEESVNNDISSWTKGRSGEALSLLKKRFSHRPVQEKFVCLNCGFETHADEQAALNIARSWLFLRSQEYKKYQTNKTTGNTDKRAFVETWQSFYRKKLKEVWKPAV

SEQ ID NO: 237 - protein, 978 aa, synthetic construct
QEIKRINKIRRRLVKDSNTKKAGKTGPMKTLLVRVMTPDLRERLENLRKKPENIPQPISNTSRANLNKLLTDYTEMKKAILHVYWEEFQKDPVGLMSRVAQPASKKIDQNKLKPEMDEKGNLTTAGFACSQCGQPLFVYKLEQVSEKGKAYTNYFGRCNVAEHEKLILLAQLKPEKDSDEAVTYSLGKFGQRALDFYSIHVTKESTHPVKPLAQIAGNRYASGPVGKALSDACMGTIASFLSKYQDIIIEHQKVVKGNQKRLESLRELAGKENLEYPSVTLPPQPHTKEGVDAYNEVIARVRMWVNLNLWQKLKLSRDDAKPLLRLKGFPSFPLVERQANEVDWWDMVCNVKKLINEKKEDGKVFWQNLAGYKRQEALRPYLSSEEDRKKGKKFARYQLGDLLNHLEKKHGEDWGKVYDEAWERIDKKVEGLSKHIKLEEERRSEDAQSKAALTDWLRAKASFVIEGLKEADKDEFCRCELKLQKWYGDLRGKPFAIEAENSILDISGFSKQYNCAFIWQKDGVKKLNLYLIINYFKGGKLRFKKIKPEAFEANRFYTVINKKSGEIVPMEVNFNFDDPNLIILPLAFGKRQGREFIWNDLLSLETGSLKLANGRVIEKTLYNRRTRQDEPALFVALTFERREVLDSSNIKPMNLIGVDRGENIPAVIALTDPEGCPLSRFKDSLGNPTHILRIGESYKEKQRTIQAKKEVEQRRAGGYSRKYASKAKNLADDMVRNTARDLLYYAVTQDAMLIFENLSRGFGRQGKRTFMAERQYTRMEDWLTAKLAYEGLPSKTYLSKTLAQYTSKTCSNCGFTITSADYDRVLEKLKKTATGWMTTINGKELKVEGQITYYNRYKRQNVVKDLSVELDRLSEESVNNDISSWTKGRSGEALSLLKKRFSHRPVQEKFVCLNCGFETHADEQAALNIARSWLFLRSQEYKKYQTNKTTGNTDKRAFVETWQSFYRKKLKEVWKPAV

SEQ ID NO: 238 - protein, 978 aa, synthetic construct
QEIKRINKIRRRLVKDSNTKKAGKTGPMKTLLVRVMTPDLRERLENLRKKPENIPQPISNTSRANLNKLLTDYTEMKKAILHVYWEEFQKDPVGLMSRVAQPASKKIDQNKLKPEMDEKGNLTTAGFACSQCGQPLFVYKLEQVSEKGKAYTNYFGRCNVAEHEKLILLAQLKPEKDSDEAVTYSLGKFGQRALDFYSIHVTKESTHPVKPLAQIAGNRYASGPVGKALSDACMGTIASFLSKYQDIIIEHQKVVKGNQKRLESLRELAGKENLEYPSVTLPPQPHTKEGVDAYNEVIARVRMWVNLNLWQKLKLSRDDAKPLLRLKGFPSFPLVERQANEVDWWDMVCNVKKLINEKKEDGKVFWQNLAGYKRQEALRPYLSSEEDRKKGKKFARYQLGDLLWHLEKKHGEDWGKVYDEAWERIDKKVEGLSKHIKLEEERRSEDAQSKAALTDWLRAKASFVIEGLKEADKDEFCRCELKLQKWYGDLRGKPFAIEAENSILDISGFSKQYNCAFIWQKDGVKKLNLYLIINYFKGGKLRFKKIKPEAFEANRFYTVINKKSGEIVPMEVNFNFDDPNLIILPLAFGKRQGREFIWNDLLSLETGSLKLANGRVIEKTLYNRRTRQDEPALFVALTFERREVLDSSNIKPMNLIGVDRGENIPAVIALTDPEGCPLSRFKDSLGNPTHILRIGESYKEKQRTIQAKKEVEQRRAGGYSRKYASKAKNLADDMVRNTARDLLYYAVTQDAMLIFENLSRGFGRQGKRTFMAERQYTRMEDWLTAKLAYEGLPSKTYLSKTLAQYTSKTCSNCGFTITSADYDRVLEKLKKTATGWMTTINGKELKVEGQITYYNRYKRQNVVKDLSVELDRLSEESVNNDISSWTKGRSGEALSLLKKRFSHRPVQEKFVCLNCGFETHADEQAALNIARSWLFLRSQEYKKYQTNKTTGNTDKRAFVETWQSFYRKKLKEVWKPAV

SEQ ID NO: 239 - protein, 978 aa, synthetic construct
QEIKRINKIRRRLVKDSNTKKAGKTGPMKTLLVRVMTPDLRERLENLRKKPENIPQPISNTSRANLNKLLTDYTEMKKAILHVYWEEFQKDPVGLMSRVAQPASKKIDQNKLKPEMDEKGNLTTAGFACSQCGQPLFVYKLEQVSEKGKAYTNYFGRCNVAEHEKLILLAQLKPEKDSDEAVTYSLGKFGQRALDFYSIHVTKESTHPVKPLAQIAGNRYASGPVGKALSDACMGTIASFLSKYQDIIIEHQKVVKGNQKRLESLRELAGKENLEYPSVTLPPQPHTKEGVDAYNEVIARVRMWVNLNLWQKLKLSRDDAKPLLRLKGFPSFPLVERQANEVDWWDMVCNVKKLINEKKEDGKVFWQNLAGYKRQEALRPYLSSEEDRKKGKKFARYQLGDLLLHLYKKHGEDWGKVYDEAWERIDKKVEGLSKHIKLEEERRSEDAQSKAALTDWLRAKASFVIEGLKEADKDEFCRCELKLQKWYGDLRGKPFAIEAENSILDISGFSKQYNCAFIWQKDGVKKLNLYLIINYFKGGKLRFKKIKPEAFEANRFYTVINKKSGEIVPMEVNFNFDDPNLIILPLAFGKRQGREFIWNDLLSLETGSLKLANGRVIEKTLYNRRTRQDEPALFVALTFERREVLDSSNIKPMNLIGVDRGENIPAVIALTDPEGCPLSRFKDSLGNPTHILRIGESYKEKQRTIQAKKEVEQRRAGGYSRKYASKAKNLADDMVRNTARDLLYYAVTQDAMLIFENLSRGFGRQGKRTFMAERQYTRMEDWLTAKLAYEGLPSKTYLSKTLAQYTSKTCSNCGFTITSADYDRVLEKLKKTATGWMTTINGKELKVEGQITYYNRYKRQNVVKDLSVELDRLSEESVNNDISSWTKGRSGEALSLLKKRFSHRPVQEKFVCLNCGFETHADEQAALNIARSWLFLRSQEYKKYQTNKTTGNTDKRAFVETWQSFYRKKLKEVWKPAV

SEQ ID NO: 240 - protein, 978 aa, synthetic construct
QEIKRINKIRRRLVKDSNTKKAGKTGPMKTLLVRVMTPDLRERLENLRKKPENIPQPISNTSRANLNKLLTDYTEMKKAILHVYWEEFQKDPVGLMSRVAQPASKKIDQNKLKPEMDEKGNLTTAGFACSQCGQPLFVYKLEQVSEKGKAYTNYFGRCNVAEHEKLILLAQLKPEKDSDEAVTYSLGKFGQRALDFYSIHVTKESTHPVKPLAQIAGNRYASGPVGKALSDACMGTIASFLSKYQDIIIEHQKVVKGNQKRLESLRELAGKENLEYPSVTLPPQPHTKEGVDAYNEVIARVRMWVNLNLWQKLKLSRDDAKPLLRLKGFPSFPLVERQANEVDWWDMVCNVKKLINEKKEDGKVFWQNLAGYKRQEALRPYLSSEEDRKKGKKFARYQLGDLLLHLEKKHPEDWGKVYDEAWERIDKKVEGLSKHIKLEEERRSEDAQSKAALTDWLRAKASFVIEGLKEADKDEFCRCELKLQKWYGDLRGKPFAIEAENSILDISGFSKQYNCAFIWQKDGVKKLNLYLIINYFKGGKLRFKKIKPEAFEANRFYTVINKKSGEIVPMEVNFNFDDPNLIILPLAFGKRQGREFIWNDLLSLETGSLKLANGRVIEKTLYNRRTRQDEPALFVALTFERREVLDSSNIKPMNLIGVDRGENIPAVIALTDPEGCPLSRFKDSLGNPTHILRIGESYKEKQRTIQAKKEVEQRRAGGYSRKYASKAKNLADDMVRNTARDLLYYAVTQDAMLIFENLSRGFGRQGKRTFMAERQYTRMEDWLTAKLAYEGLPSKTYLSKTLAQYTSKTCSNCGFTITSADYDRVLEKLKKTATGWMTTINGKELKVEGQITYYNRYKRQNVVKDLSVELDRLSEESVNNDISSWTKGRSGEALSLLKKRFSHRPVQEKFVCLNCGFETHADEQAALNIARSWLFLRSQEYKKYQTNKTTGNTDKRAFVETWQSFYRKKLKEVWKPAV

SEQ ID NO: 241 - protein, 979 aa, synthetic construct
QEIKRINKIRRRLVKDSNTKKAGKTGPMKTLLVRVMTPDLRERLENLRKKPENIPQPISNTSRANLNKLLTDYTEMKKAILHVYWEEFQKDPVGLMSRVAQPASKKIDQNKLKPEMDEKGNLTTAGFACSQCGQPLFVYKLEQVSEKGKAYTNYFGRCNVAEHEKLILLAQLKPEKDSDEAVTYSLGKFGQRALDFYSIHVTKESTHPVKPLAQIAGNRYASGPVGKALSDACMGTIASFLSKYQDIIIEHQKVVKGNQKRLESLRELAGKENLEYPSVTLPPQPHTKEGVDAYNEVIARVRMWVNLNLWQKLKLSRDDAKPLLRLKGFPSFPLVERQANEVDWWDMVCNVKKLINEKKEDGKVFWQNLAGYKRQEALRPYLSSEEDRKKGKKFARYQLGDLLLHLEKKHEGEDWGKVYDEAWERIDKKVEGLSKHIKLEEERRSEDAQSKAALTDWLRAKASFVIEGLKEADKDEFCRCELKLQKWYGDLRGKPFAIEAENSILDISGFSKQYNCAFIWQKDGVKKLNLYLIINYFKGGKLRFKKIKPEAFEANRFYTVINKKSGEIVPMEVNFNFDDPNLIILPLAFGKRQGREFIWNDLLSLETGSLKLANGRVIEKTLYNRRTRQDEPALFVALTFERREVLDSSNIKPMNLIGVDRGENIPAVIALTDPEGCPLSRFKDSLGNPTHILRIGESYKEKQRTIQAKKEVEQRRAGGYSRKYASKAKNLADDMVRNTARDLLYYAVTQDAMLIFENLSRGFGRQGKRTFMAERQYTRMEDWLTAKLAYEGLPSKTYLSKTLAQYTSKTCSNCGFTITSADYDRVLEKLKKTATGWMTTINGKELKVEGQITYYNRYKRQNVVKDLSVELDRLSEESVNNDISSWTKGRSGEALSLLKKRFSHRPVQEKFVCLNCGFETHADEQAALNIARSWLFLRSQEYKKYQTNKTTGNTDKRAFVETWQSFYRKKLKEVWKPAV

SEQ ID NO: 242 - protein, 979 aa, synthetic construct
QEIKRINKIRRRLVKDSNTKKAGKTGPMKTLLVRVMTPDLRERLENLRKKPENIPQPISNTSRANLNKLLTDYTEMKKAILHVYWEEFQKDPVGLMSRVAQPASKKIDQNKLKPEMDEKGNLTTAGFACSQCGQPLFVYKLEQVSEKGKAYTNYFGRCNVAEHEKLILLAQLKPEKDSDEAVTYSLGKFGQRALDFYSIHVTKESTHPVKPLAQIAGNRYASGPVGKALSDACMGTIASFLSKYQDIIIEHQKVVKGNQKRLESLRELAGKENLEYPSVTLPPQPHTKEGVDAYNEVIARVRMWVNLNLWQKLKLSRDDAKPLLRLKGFPSFPLVERQANEVDWWDMVCNVKKLINEKKEDGKVFWQNLAGYKRQEALRPYLSSEEDRKKGKKFARYQLGDLLLHLEKKHGERDWGKVYDEAWERIDKKVEGLSKHIKLEEERRSEDAQSKAALTDWLRAKASFVIEGLKEADKDEFCRCELKLQKWYGDLRGKPFAIEAENSILDISGFSKQYNCAFIWQKDGVKKLNLYLIINYFKGGKLRFKKIKPEAFEANRFYTVINKKSGEIVPMEVNFNFDDPNLIILPLAFGKRQGREFIWNDLLSLETGSLKLANGRVIEKTLYNRRTRQDEPALFVALTFERREVLDSSNIKPMNLIGVDRGENIPAVIALTDPEGCPLSRFKDSLGNPTHILRIGESYKEKQRTIQAKKEVEQRRAGGYSRKYASKAKNLADDMVRNTARDLLYYAVTQDAMLIFENLSRGFGRQGKRTFMAERQYTRMEDWLTAKLAYEGLPSKTYLSKTLAQYTSKTCSNCGFTITSADYDRVLEKLKKTATGWMTTINGKELKVEGQITYYNRYKRQNVVKDLSVELDRLSEESVNNDISSWTKGRSGEALSLLKKRFSHRPVQEKFVCLNCGFETHADEQAALNIARSWLFLRSQEYKKYQTNKTTGNTDKRAFVETWQSFYRKKLKEVWKPAV

SEQ ID NO: 243 - protein, 979 aa, synthetic construct
QEIKRINKIRRRLVKDSNTKKAGKTGPMKTLLVRVMTPDLRERLENLRKKPENIPQPISNTSRANLNKLLTDYTEMKKAILHVYWEEFQKDPVGLMSRVAQPASKKIDQNKLKPEMDEKGNLTTAGFACSQCGQPLFVYKLEQVSEKGKAYTNYFGRCNVAEHEKLILLAQLKPEKDSDEAVTYSLGKFGQRALDFYSIHVTKESTHPVKPLAQIAGNRYASGPVGKALSDACMGTIASFLSKYQDIIIEHQKVVKGNQKRLESLRELAGKENLEYPSVTLPPQPHTKEGVDAYNEVIARVRMWVNLNLWQKLKLSRDDAKPLLRLKGFPSFPLVERQANEVDWWDMVCNVKKLINEKKEDGKVFWQNLAGYKRQEALRPYLSSEEDRKKGKKFARYQLGDLLLHLEKKHGEWDWGKVYDEAWERIDKKVEGLSKHIKLEEERRSEDAQSKAALTDWLRAKASFVIEGLKEADKDEFCRCELKLQKWYGDLRGKPFAIEAENSILDISGFSKQYNCAFIWQKDGVKKLNLYLIINYFKGGKLRFKKIKPEAFEANRFYTVINKKSGEIVPMEVNFNFDDPNLIILPLAFGKRQGREFIWNDLLSLETGSLKLANGRVIEKTLYNRRTRQDEPALFVALTFERREVLDSSNIKPMNLIGVDRGENIPAVIALTDPEGCPLSRFKDSLGNPTHILRIGESYKEKQRTIQAKKEVEQRRAGGYSRKYASKAKNLADDMVRNTARDLLYYAVTQDAMLIFENLSRGFGRQGKRTFMAERQYTRMEDWLTAKLAYEGLPSKTYLSKTLAQYTSKTCSNCGFTITSADYDRVLEKLKKTATGWMTTINGKELKVEGQITYYNRYKRQNVVKDLSVELDRLSEESVNNDISSWTKGRSGEALSLLKKRFSHRPVQEKFVCLNCGFETHADEQAALNIARSWLFLRSQEYKKYQTNKTTGNTDKRAFVETWQSFYRKKLKEVWKPAV

SEQ ID NO: 244 - protein, 979 aa, synthetic construct
QEIKRINKIRRRLVKDSNTKKAGKTGPMKTLLVRVMTPDLRERLENLRKKPENIPQPISNTSRANLNKLLTDYTEMKKAILHVYWEEFQKDPVGLMSRVAQPASKKIDQNKLKPEMDEKGNLTTAGFACSQCGQPLFVYKLEQVSEKGKAYTNYFGRCNVAEHEKLILLAQLKPEKDSDEAVTYSLGKFGQRALDFYSIHVTKESTHPVKPLAQIAGNRYASGPVGKALSDACMGTIASFLSKYQDIIIEHQKVVKGNQKRLESLRELAGKENLEYPSVTLPPQPHTKEGVDAYNEVIARVRMWVNLNLWQKLKLSRDDAKPLLRLKGFPSFPLVERQANEVDWWDMVCNVKKLINEKKEDGKVFWQNLAGYKRQEALRPYLSSEEDRKKGKKFARYQLGDLLLHLEKKHGEYDWGKVYDEAWERIDKKVEGLSKHIKLEEERRSEDAQSKAALTDWLRAKASFVIEGLKEADKDEFCRCELKLQKWYGDLRGKPFAIEAENSILDISGFSKQYNCAFIWQKDGVKKLNLYLIINYFKGGKLRFKKIKPEAFEANRFYTVINKKSGEIVPMEVNFNFDDPNLIILPLAFGKRQGREFIWNDLLSLETGSLKLANGRVIEKTLYNRRTRQDEPALFVALTFERREVLDSSNIKPMNLIGVDRGENIPAVIALTDPEGCPLSRFKDSLGNPTHILRIGESYKEKQRTIQAKKEVEQRRAGGYSRKYASKAKNLADDMVRNTARDLLYYAVTQDAMLIFENLSRGFGRQGKRTFMAERQYTRMEDWLTAKLAYEGLPSKTYLSKTLAQYTSKTCSNCGFTITSADYDRVLEKLKKTATGWMTTINGKELKVEGQITYYNRYKRQNVVKDLSVELDRLSEESVNNDISSWTKGRSGEALSLLKKRFSHRPVQEKFVCLNCGFETHADEQAALNIARSWLFLRSQEYKKYQTNKTTGNTDKRAFVETWQSFYRKKLKEVWKPAV

SEQ ID NO: 245 - protein, 979 aa, synthetic construct
QEIKRINKIRRRLVKDSNTKKAGKTGPMKTLLVRVMTPDLRERLENLRKKPENIPQPISNTSRANLNKLLTDYTEMKKAILHVYWEEFQKDPVGLMSRVAQPASKKIDQNKLKPEMDEKGNLTTAGFACSQCGQPLFVYKLEQVSEKGKAYTNYFGRCNVAEHEKLILLAQLKPEKDSDEAVTYSLGKFGQRALDFYSIHVTKESTHPVKPLAQIAGNRYASGPVGKALSDACMGTIASFLSKYQDIIIEHQKVVKGNQKRLESLRELAGKENLEYPSVTLPPQPHTKEGVDAYNEVIARVRMWVNLNLWQKLKLSRDDAKPLLRLKGFPSFPLVERQANEVDWWDMVCNVKKLINEKKEDGKVFWQNLAGYKRQEALRPYLSSEEDRKKGKKFARYQLGDLLLHLEKKHGEDYWGKVYDEAWERIDKKVEGLSKHIKLEEERRSEDAQSKAALTDWLRAKASFVIEGLKEADKDEFCRCELKLQKWYGDLRGKPFAIEAENSILDISGFSKQYNCAFIWQKDGVKKLNLYLIINYFKGGKLRFKKIKPEAFEANRFYTVINKKSGEIVPMEVNFNFDDPNLIILPLAFGKRQGREFIWNDLLSLETGSLKLANGRVIEKTLYNRRTRQDEPALFVALTFERREVLDSSNIKPMNLIGVDRGENIPAVIALTDPEGCPLSRFKDSLGNPTHILRIGESYKEKQRTIQAKKEVEQRRAGGYSRKYASKAKNLADDMVRNTARDLLYYAVTQDAMLIFENLSRGFGRQGKRTFMAERQYTRMEDWLTAKLAYEGLPSKTYLSKTLAQYTSKTCSNCGFTITSADYDRVLEKLKKTATGWMTTINGKELKVEGQITYYNRYKRQNVVKDLSVELDRLSEESVNNDISSWTKGRSGEALSLLKKRFSHRPVQEKFVCLNCGFETHADEQAALNIARSWLFLRSQEYKKYQTNKTTGNTDKRAFVETWQSFYRKKLKEVWKPAV

SEQ ID NO: 246 - protein, 978 aa, synthetic construct
QEIKRINKIRRRLVKDSNTKKAGKTGPMKTLLVRVMTPDLRERLENLRKKPENIPQPISNTSRANLNKLLTDYTEMKKAILHVYWEEFQKDPVGLMSRVAQPASKKIDQNKLKPEMDEKGNLTTAGFACSQCGQPLFVYKLEQVSEKGKAYTNYFGRCNVAEHEKLILLAQLKPEKDSDEAVTYSLGKFGQRALDFYSIHVTKESTHPVKPLAQIAGNRYASGPVGKALSDACMGTIASFLSKYQDIIIEHQKVVKGNQKRLESLRELAGKENLEYPSVTLPPQPHTKEGVDAYNEVIARVRMWVNLNLWQKLKLSRDDAKPLLRLKGFPSFPLVERQANEVDWWDMVCNVKKLINEKKEDGKVFWQNLAGYKRQEALRPYLSSEEDRKKGKKFARYQLGDLLLHLEKKHGEDRGKVYDEAWERIDKKVEGLSKHIKLEEERRSEDAQSKAALTDWLRAKASFVIEGLKEADKDEFCRCELKLQKWYGDLRGKPFAIEAENSILDISGFSKQYNCAFIWQKDGVKKLNLYLIINYFKGGKLRFKKIKPEAFEANRFYTVINKKSGEIVPMEVNFNFDDPNLIILPLAFGKRQGREFIWNDLLSLETGSLKLANGRVIEKTLYNRRTRQDEPALFVALTFERREVLDSSNIKPMNLIGVDRGENIPAVIALTDPEGCPLSRFKDSLGNPTHILRIGESYKEKQRTIQAKKEVEQRRAGGYSRKYASKAKNLADDMVRNTARDLLYYAVTQDAMLIFENLSRGFGRQGKRTFMAERQYTRMEDWLTAKLAYEGLPSKTYLSKTLAQYTSKTCSNCGFTITSADYDRVLEKLKKTATGWMTTINGKELKVEGQITYYNRYKRQNVVKDLSVELDRLSEESVNNDISSWTKGRSGEALSLLKKRFSHRPVQEKFVCLNCGFETHADEQAALNIARSWLFLRSQEYKKYQTNKTTGNTDKRAFVETWQSFYRKKLKEVWKPAV

SEQ ID NO: 247 - protein, 978 aa, synthetic construct
QEIKRINKIRRRLVKDSNTKKAGKTGPMKTLLVRVMTPDLRERLENLRKKPENIPQPISNTSRANLNKLLTDYTEMKKAILHVYWEEFQKDPVGLMSRVAQPASKKIDQNKLKPEMDEKGNLTTAGFACSQCGQPLFVYKLEQVSEKGKAYTNYFGRCNVAEHEKLILLAQLKPEKDSDEAVTYSLGKFGQRALDFYSIHVTKESTHPVKPLAQIAGNRYASGPVGKALSDACMGTIASFLSKYQDIIIEHQKVVKGNQKRLESLRELAGKENLEYPSVTLPPQPHTKEGVDAYNEVIARVRMWVNLNLWQKLKLSRDDAKPLLRLKGFPSFPLVERQANEVDWWDMVCNVKKLINEKKEDGKVFWQNLAGYKRQEALRPYLSSEEDRKKGKKFARYQLGDLLLHLEKKHGEDWGDVYDEAWERIDKKVEGLSKHIKLEEERRSEDAQSKAALTDWLRAKASFVIEGLKEADKDEFCRCELKLQKWYGDLRGKPFAIEAENSILDISGFSKQYNCAFIWQKDGVKKLNLYLIINYFKGGKLRFKKIKPEAFEANRFYTVINKKSGEIVPMEVNFNFDDPNLIILPLAFGKRQGREFIWNDLLSLETGSLKLANGRVIEKTLYNRRTRQDEPALFVALTFERREVLDSSNIKPMNLIGVDRGENIPAVIALTDPEGCPLSRFKDSLGNPTHILRIGESYKEKQRTIQAKKEVEQRRAGGYSRKYASKAKNLADDMVRNTARDLLYYAVTQDAMLIFENLSRGFGRQGKRTFMAERQYTRMEDWLTAKLAYEGLPSKTYLSKTLAQYTSKTCSNCGFTITSADYDRVLEKLKKTATGWMTTINGKELKVEGQITYYNRYKRQNVVKDLSVELDRLSEESVNNDISSWTKGRSGEALSLLKKRFSHRPVQEKFVCLNCGFETHADEQAALNIARSWLFLRSQEYKKYQTNKTTGNTDKRAFVETWQSFYRKKLKEVWKPAV

SEQ ID NO: 248 - protein, 978 aa, synthetic construct
QEIKRINKIRRRLVKDSNTKKAGKTGPMKTLLVRVMTPDLRERLENLRKKPENIPQPISNTSRANLNKLLTDYTEMKKAILHVYWEEFQKDPVGLMSRVAQPASKKIDQNKLKPEMDEKGNLTTAGFACSQCGQPLFVYKLEQVSEKGKAYTNYFGRCNVAEHEKLILLAQLKPEKDSDEAVTYSLGKFGQRALDFYSIHVTKESTHPVKPLAQIAGNRYASGPVGKALSDACMGTIASFLSKYQDIIIEHQKVVKGNQKRLESLRELAGKENLEYPSVTLPPQPHTKEGVDAYNEVIARVRMWVNLNLWQKLKLSRDDAKPLLRLKGFPSFPLVERQANEVDWWDMVCNVKKLINEKKEDGKVFWQNLAGYKRQEALRPYLSSEEDRKKGKKFARYQLGDLLLHLEKKHGEDWGPVYDEAWERIDKKVEGLSKHIKLEEERRSEDAQSKAALTDWLRAKASFVIEGLKEADKDEFCRCELKLQKWYGDLRGKPFAIEAENSILDISGFSKQYNCAFIWQKDGVKKLNLYLIINYFKGGKLRFKKIKPEAFEANRFYTVINKKSGEIVPMEVNFNFDDPNLIILPLAFGKRQGREFIWNDLLSLETGSLKLANGRVIEKTLYNRRTRQDEPALFVALTFERREVLDSSNIKPMNLIGVDRGENIPAVIALTDPEGCPLSRFKDSLGNPTHILRIGESYKEKQRTIQAKKEVEQRRAGGYSRKYASKAKNLADDMVRNTARDLLYYAVTQDAMLIFENLSRGFGRQGKRTFMAERQYTRMEDWLTAKLAYEGLPSKTYLSKTLAQYTSKTCSNCGFTITSADYDRVLEKLKKTATGWMTTINGKELKVEGQITYYNRYKRQNVVKDLSVELDRLSEESVNNDISSWTKGRSGEALSLLKKRFSHRPVQEKFVCLNCGFETHADEQAALNIARSWLFLRSQEYKKYQTNKTTGNTDKRAFVETWQSFYRKKLKEVWKPAV

SEQ ID NO: 249 - protein, 978 aa, synthetic construct
QEIKRINKIRRRLVKDSNTKKAGKTGPMKTLLVRVMTPDLRERLENLRKKPENIPQPISNTSRANLNKLLTDYTEMKKAILHVYWEEFQKDPVGLMSRVAQPASKKIDQNKLKPEMDEKGNLTTAGFACSQCGQPLFVYKLEQVSEKGKAYTNYFGRCNVAEHEKLILLAQLKPEKDSDEAVTYSLGKFGQRALDFYSIHVTKESTHPVKPLAQIAGNRYASGPVGKALSDACMGTIASFLSKYQDIIIEHQKVVKGNQKRLESLRELAGKENLEYPSVTLPPQPHTKEGVDAYNEVIARVRMWVNLNLWQKLKLSRDDAKPLLRLKGFPSFPLVERQANEVDWWDMVCNVKKLINEKKEDGKVFWQNLAGYKRQEALRPYLSSEEDRKKGKKFARYQLGDLLLHLEKKHGEDWGKLYDEAWERIDKKVEGLSKHIKLEEERRSEDAQSKAALTDWLRAKASFVIEGLKEADKDEFCRCELKLQKWYGDLRGKPFAIEAENSILDISGFSKQYNCAFIWQKDGVKKLNLYLIINYFKGGKLRFKKIKPEAFEANRFYTVINKKSGEIVPMEVNFNFDDPNLIILPLAFGKRQGREFIWNDLLSLETGSLKLANGRVIEKTLYNRRTRQDEPALFVALTFERREVLDSSNIKPMNLIGVDRGENIPAVIALTDPEGCPLSRFKDSLGNPTHILRIGESYKEKQRTIQAKKEVEQRRAGGYSRKYASKAKNLADDMVRNTARDLLYYAVTQDAMLIFENLSRGFGRQGKRTFMAERQYTRMEDWLTAKLAYEGLPSKTYLSKTLAQYTSKTCSNCGFTITSADYDRVLEKLKKTATGWMTTINGKELKVEGQITYYNRYKRQNVVKDLSVELDRLSEESVNNDISSWTKGRSGEALSLLKKRFSHRPVQEKFVCLNCGFETHADEQAALNIARSWLFLRSQEYKKYQTNKTTGNTDKRAFVETWQSFYRKKLKEVWKPAV

SEQ ID NO: 250 - protein, 978 aa, synthetic construct
QEIKRINKIRRRLVKDSNTKKAGKTGPMKTLLVRVMTPDLRERLENLRKKPENIPQPISNTSRANLNKLLTDYTEMKKAILHVYWEEFQKDPVGLMSRVAQPASKKIDQNKLKPEMDEKGNLTTAGFACSQCGQPLFVYKLEQVSEKGKAYTNYFGRCNVAEHEKLILLAQLKPEKDSDEAVTYSLGKFGQRALDFYSIHVTKESTHPVKPLAQIAGNRYASGPVGKALSDACMGTIASFLSKYQDIIIEHQKVVKGNQKRLESLRELAGKENLEYPSVTLPPQPHTKEGVDAYNEVIARVRMWVNLNLWQKLKLSRDDAKPLLRLKGFPSFPLVERQANEVDWWDMVCNVKKLINEKKEDGKVFWQNLAGYKRQEALRPYLSSEEDRKKGKKFARYQLGDLLLHLEKKHGEDWGKVYGEAWERIDKKVEGLSKHIKLEEERRSEDAQSKAALTDWLRAKASFVIEGLKEADKDEFCRCELKLQKWYGDLRGKPFAIEAENSILDISGFSKQYNCAFIWQKDGVKKLNLYLIINYFKGGKLRFKKIKPEAFEANRFYTVINKKSGEIVPMEVNFNFDDPNLIILPLAFGKRQGREFIWNDLLSLETGSLKLANGRVIEKTLYNRRTRQDEPALFVALTFERREVLDSSNIKPMNLIGVDRGENIPAVIALTDPEGCPLSRFKDSLGNPTHILRIGESYKEKQRTIQAKKEVEQRRAGGYSRKYASKAKNLADDMVRNTARDLLYYAVTQDAMLIFENLSRGFGRQGKRTFMAERQYTRMEDWLTAKLAYEGLPSKTYLSKTLAQYTSKTCSNCGFTITSADYDRVLEKLKKTATGWMTTINGKELKVEGQITYYNRYKRQNVVKDLSVELDRLSEESVNNDISSWTKGRSGEALSLLKKRFSHRPVQEKFVCLNCGFETHADEQAALNIARSWLFLRSQEYKKYQTNKTTGNTDKRAFVETWQSFYRKKLKEVWKPAV

SEQ ID NO: 251 - protein, 978 aa, synthetic construct
QEIKRINKIRRRLVKDSNTKKAGKTGPMKTLLVRVMTPDLRERLENLRKKPENIPQPISNTSRANLNKLLTDYTEMKKAILHVYWEEFQKDPVGLMSRVAQPASKKIDQNKLKPEMDEKGNLTTAGFACSQCGQPLFVYKLEQVSEKGKAYTNYFGRCNVAEHEKLILLAQLKPEKDSDEAVTYSLGKFGQRALDFYSIHVTKESTHPVKPLAQIAGNRYASGPVGKALSDACMGTIASFLSKYQDIIIEHQKVVKGNQKRLESLRELAGKENLEYPSVTLPPQPHTKEGVDAYNEVIARVRMWVNLNLWQKLKLSRDDAKPLLRLKGFPSFPLVERQANEVDWWDMVCNVKKLINEKKEDGKVFWQNLAGYKRQEALRPYLSSEEDRKKGKKFARYQLGDLLLHLEKKHGEDWGKVYDEAWERIDKKVEGLSKHQKLEEERRSEDAQSKAALTDWLRAKASFVIEGLKEADKDEFCRCELKLQKWYGDLRGKPFAIEAENSILDISGFSKQYNCAFIWQKDGVKKLNLYLIINYFKGGKLRFKKIKPEAFEANRFYTVINKKSGEIVPMEVNFNFDDPNLIILPLAFGKRQGREFIWNDLLSLETGSLKLANGRVIEKTLYNRRTRQDEPALFVALTFERREVLDSSNIKPMNLIGVDRGENIPAVIALTDPEGCPLSRFKDSLGNPTHILRIGESYKEKQRTIQAKKEVEQRRAGGYSRKYASKAKNLADDMVRNTARDLLYYAVTQDAMLIFENLSRGFGRQGKRTFMAERQYTRMEDWLTAKLAYEGLPSKTYLSKTLAQYTSKTCSNCGFTITSADYDRVLEKLKKTATGWMTTINGKELKVEGQITYYNRYKRQNVVKDLSVELDRLSEESVNNDISSWTKGRSGEALSLLKKRFSHRPVQEKFVCLNCGFETHADEQAALNIARSWLFLRSQEYKKYQTNKTTGNTDKRAFVETWQSFYRKKLKEVWKPAV

SEQ ID NO: 252 - protein, 978 aa, synthetic construct
QEIKRINKIRRRLVKDSNTKKAGKTGPMKTLLVRVMTPDLRERLENLRKKPENIPQPISNTSRANLNKLLTDYTEMKKAILHVYWEEFQKDPVGLMSRVAQPASKKIDQNKLKPEMDEKGNLTTAGFACSQCGQPLFVYKLEQVSEKGKAYTNYFGRCNVAEHEKLILLAQLKPEKDSDEAVTYSLGKFGQRALDFYSIHVTKESTHPVKPLAQIAGNRYASGPVGKALSDACMGTIASFLSKYQDIIIEHQKVVKGNQKRLESLRELAGKENLEYPSVTLPPQPHTKEGVDAYNEVIARVRMWVNLNLWQKLKLSRDDAKPLLRLKGFPSFPLVERQANEVDWWDMVCNVKKLINEKKEDGKVFWQNLAGYKRQEALRPYLSSEEDRKKGKKFARYQLGDLLLHLEKKHGEDWGKVYDEAWERIDKKVEGLSKHIKLEEEDRSEDAQSKAALTDWLRAKASFVIEGLKEADKDEFCRCELKLQKWYGDLRGKPFAIEAENSILDISGFSKQYNCAFIWQKDGVKKLNLYLIINYFKGGKLRFKKIKPEAFEANRFYTVINKKSGEIVPMEVNFNFDDPNLIILPLAFGKRQGREFIWNDLLSLETGSLKLANGRVIEKTLYNRRTRQDEPALFVALTFERREVLDSSNIKPMNLIGVDRGENIPAVIALTDPEGCPLSRFKDSLGNPTHILRIGESYKEKQRTIQAKKEVEQRRAGGYSRKYASKAKNLADDMVRNTARDLLYYAVTQDAMLIFENLSRGFGRQGKRTFMAERQYTRMEDWLTAKLAYEGLPSKTYLSKTLAQYTSKTCSNCGFTITSADYDRVLEKLKKTATGWMTTINGKELKVEGQITYYNRYKRQNVVKDLSVELDRLSEESVNNDISSWTKGRSGEALSLLKKRFSHRPVQEKFVCLNCGFETHADEQAALNIARSWLFLRSQEYKKYQTNKTTGNTDKRAFVETWQSFYRKKLKEVWKPAV

SEQ ID NO: 253 - protein, 978 aa, synthetic construct
QEIKRINKIRRRLVKDSNTKKAGKTGPMKTLLVRVMTPDLRERLENLRKKPENIPQPISNTSRANLNKLLTDYTEMKKAILHVYWEEFQKDPVGLMSRVAQPASKKIDQNKLKPEMDEKGNLTTAGFACSQCGQPLFVYKLEQVSEKGKAYTNYFGRCNVAEHEKLILLAQLKPEKDSDEAVTYSLGKFGQRALDFYSIHVTKESTHPVKPLAQIAGNRYASGPVGKALSDACMGTIASFLSKYQDIIIEHQKVVKGNQKRLESLRELAGKENLEYPSVTLPPQPHTKEGVDAYNEVIARVRMWVNLNLWQKLKLSRDDAKPLLRLKGFPSFPLVERQANEVDWWDMVCNVKKLINEKKEDGKVFWQNLAGYKRQEALRPYLSSEEDRKKGKKFARYQLGDLLLHLEKKHGEDWGKVYDEAWERIDKKVEGLSKHIKLEEERRSEDAQSKAATTDWLRAKASFVIEGLKEADKDEFCRCELKLQKWYGDLRGKPFAIEAENSILDISGFSKQYNCAFIWQKDGVKKLNLYLIINYFKGGKLRFKKIKPEAFEANRFYTVINKKSGEIVPMEVNFNFDDPNLIILPLAFGKRQGREFIWNDLLSLETGSLKLANGRVIEKTLYNRRTRQDEPALFVALTFERREVLDSSNIKPMNLIGVDRGENIPAVIALTDPEGCPLSRFKDSLGNPTHILRIGESYKEKQRTIQAKKEVEQRRAGGYSRKYASKAKNLADDMVRNTARDLLYYAVTQDAMLIFENLSRGFGRQGKRTFMAERQYTRMEDWLTAKLAYEGLPSKTYLSKTLAQYTSKTCSNCGFTITSADYDRVLEKLKKTATGWMTTINGKELKVEGQITYYNRYKRQNVVKDLSVELDRLSEESVNNDISSWTKGRSGEALSLLKKRFSHRPVQEKFVCLNCGFETHADEQAALNIARSWLFLRSQEYKKYQTNKTTGNTDKRAFVETWQSFYRKKLKEVWKPAV

SEQ ID NO: 254 - protein, 978 aa, synthetic construct
QEIKRINKIRRRLVKDSNTKKAGKTGPMKTLLVRVMTPDLRERLENLRKKPENIPQPISNTSRANLNKLLTDYTEMKKAILHVYWEEFQKDPVGLMSRVAQPASKKIDQNKLKPEMDEKGNLTTAGFACSQCGQPLFVYKLEQVSEKGKAYTNYFGRCNVAEHEKLILLAQLKPEKDSDEAVTYSLGKFGQRALDFYSIHVTKESTHPVKPLAQIAGNRYASGPVGKALSDACMGTIASFLSKYQDIIIEHQKVVKGNQKRLESLRELAGKENLEYPSVTLPPQPHTKEGVDAYNEVIARVRMWVNLNLWQKLKLSRDDAKPLLRLKGFPSFPLVERQANEVDWWDMVCNVKKLINEKKEDGKVFWQNLAGYKRQEALRPYLSSEEDRKKGKKFARYQLGDLLLHLEKKHGEDWGKVYDEAWERIDKKVEGLSKHIKLEEERRSEDAQSKAALTDWLRAKTSFVIEGLKEADKDEFCRCELKLQKWYGDLRGKPFAIEAENSILDISGFSKQYNCAFIWQKDGVKKLNLYLIINYFKGGKLRFKKIKPEAFEANRFYTVINKKSGEIVPMEVNFNFDDPNLIILPLAFGKRQGREFIWNDLLSLETGSLKLANGRVIEKTLYNRRTRQDEPALFVALTFERREVLDSSNIKPMNLIGVDRGENIPAVIALTDPEGCPLSRFKDSLGNPTHILRIGESYKEKQRTIQAKKEVEQRRAGGYSRKYASKAKNLADDMVRNTARDLLYYAVTQDAMLIFENLSRGFGRQGKRTFMAERQYTRMEDWLTAKLAYEGLPSKTYLSKTLAQYTSKTCSNCGFTITSADYDRVLEKLKKTATGWMTTINGKELKVEGQITYYNRYKRQNVVKDLSVELDRLSEESVNNDISSWTKGRSGEALSLLKKRFSHRPVQEKFVCLNCGFETHADEQAALNIARSWLFLRSQEYKKYQTNKTTGNTDKRAFVETWQSFYRKKLKEVWKPAV

SEQ ID NO: 255 - protein, 978 aa, synthetic construct
QEIKRINKIRRRLVKDSNTKKAGKTGPMKTLLVRVMTPDLRERLENLRKKPENIPQPISNTSRANLNKLLTDYTEMKKAILHVYWEEFQKDPVGLMSRVAQPASKKIDQNKLKPEMDEKGNLTTAGFACSQCGQPLFVYKLEQVSEKGKAYTNYFGRCNVAEHEKLILLAQLKPEKDSDEAVTYSLGKFGQRALDFYSIHVTKESTHPVKPLAQIAGNRYASGPVGKALSDACMGTIASFLSKYQDIIIEHQKVVKGNQKRLESLRELAGKENLEYPSVTLPPQPHTKEGVDAYNEVIARVRMWVNLNLWQKLKLSRDDAKPLLRLKGFPSFPLVERQANEVDWWDMVCNVKKLINEKKEDGKVFWQNLAGYKRQEALRPYLSSEEDRKKGKKFARYQLGDLLLHLEKKHGEDWGKVYDEAWERIDKKVEGLSKHIKLEEERRSEDAQSKAALTDWLRAKKSFVIEGLKEADKDEFCRCELKLQKWYGDLRGKPFAIEAENSILDISGFSKQYNCAFIWQKDGVKKLNLYLIINYFKGGKLRFKKIKPEAFEANRFYTVINKKSGEIVPMEVNFNFDDPNLIILPLAFGKRQGREFIWNDLLSLETGSLKLANGRVIEKTLYNRRTRQDEPALFVALTFERREVLDSSNIKPMNLIGVDRGENIPAVIALTDPEGCPLSRFKDSLGNPTHILRIGESYKEKQRTIQAKKEVEQRRAGGYSRKYASKAKNLADDMVRNTARDLLYYAVTQDAMLIFENLSRGFGRQGKRTFMAERQYTRMEDWLTAKLAYEGLPSKTYLSKTLAQYTSKTCSNCGFTITSADYDRVLEKLKKTATGWMTTINGKELKVEGQITYYNRYKRQNVVKDLSVELDRLSEESVNNDISSWTKGRSGEALSLLKKRFSHRPVQEKFVCLNCGFETHADEQAALNIARSWLFLRSQEYKKYQTNKTTGNTDKRAFVETWQSFYRKKLKEVWKPAV

SEQ ID NO: 256 - protein, 978 aa, synthetic construct
QEIKRINKIRRRLVKDSNTKKAGKTGPMKTLLVRVMTPDLRERLENLRKKPENIPQPISNTSRANLNKLLTDYTEMKKAILHVYWEEFQKDPVGLMSRVAQPASKKIDQNKLKPEMDEKGNLTTAGFACSQCGQPLFVYKLEQVSEKGKAYTNYFGRCNVAEHEKLILLAQLKPEKDSDEAVTYSLGKFGQRALDFYSIHVTKESTHPVKPLAQIAGNRYASGPVGKALSDACMGTIASFLSKYQDIIIEHQKVVKGNQKRLESLRELAGKENLEYPSVTLPPQPHTKEGVDAYNEVIARVRMWVNLNLWQKLKLSRDDAKPLLRLKGFPSFPLVERQANEVDWWDMVCNVKKLINEKKEDGKVFWQNLAGYKRQEALRPYLSSEEDRKKGKKFARYQLGDLLLHLEKKHGEDWGKVYDEAWERIDKKVEGLSKHIKLEEERRSEDAQSKAALTDWLRAKASFVEEGLKEADKDEFCRCELKLQKWYGDLRGKPFAIEAENSILDISGFSKQYNCAFIWQKDGVKKLNLYLIINYFKGGKLRFKKIKPEAFEANRFYTVINKKSGEIVPMEVNFNFDDPNLIILPLAFGKRQGREFIWNDLLSLETGSLKLANGRVIEKTLYNRRTRQDEPALFVALTFERREVLDSSNIKPMNLIGVDRGENIPAVIALTDPEGCPLSRFKDSLGNPTHILRIGESYKEKQRTIQAKKEVEQRRAGGYSRKYASKAKNLADDMVRNTARDLLYYAVTQDAMLIFENLSRGFGRQGKRTFMAERQYTRMEDWLTAKLAYEGLPSKTYLSKTLAQYTSKTCSNCGFTITSADYDRVLEKLKKTATGWMTTINGKELKVEGQITYYNRYKRQNVVKDLSVELDRLSEESVNNDISSWTKGRSGEALSLLKKRFSHRPVQEKFVCLNCGFETHADEQAALNIARSWLFLRSQEYKKYQTNKTTGNTDKRAFVETWQSFYRKKLKEVWKPAV

SEQ ID NO: 257 - protein, 979 aa, synthetic construct
QEIKRINKIRRRLVKDSNTKKAGKTGPMKTLLVRVMTPDLRERLENLRKKPENIPQPISNTSRANLNKLLTDYTEMKKAILHVYWEEFQKDPVGLMSRVAQPASKKIDQNKLKPEMDEKGNLTTAGFACSQCGQPLFVYKLEQVSEKGKAYTNYFGRCNVAEHEKLILLAQLKPEKDSDEAVTYSLGKFGQRALDFYSIHVTKESTHPVKPLAQIAGNRYASGPVGKALSDACMGTIASFLSKYQDIIIEHQKVVKGNQKRLESLRELAGKENLEYPSVTLPPQPHTKEGVDAYNEVIARVRMWVNLNLWQKLKLSRDDAKPLLRLKGFPSFPLVERQANEVDWWDMVCNVKKLINEKKEDGKVFWQNLAGYKRQEALRPYLSSEEDRKKGKKFARYQLGDLLLHLEKKHGEDWGKVYDEAWERIDKKVEGLSKHIKLEEERRSEDAQSKAALTDWLRAKASFVISEGLKEADKDEFCRCELKLQKWYGDLRGKPFAIEAENSILDISGFSKQYNCAFIWQKDGVKKLNLYLIINYFKGGKLRFKKIKPEAFEANRFYTVINKKSGEIVPMEVNFNFDDPNLIILPLAFGKRQGREFIWNDLLSLETGSLKLANGRVIEKTLYNRRTRQDEPALFVALTFERREVLDSSNIKPMNLIGVDRGENIPAVIALTDPEGCPLSRFKDSLGNPTHILRIGESYKEKQRTIQAKKEVEQRRAGGYSRKYASKAKNLADDMVRNTARDLLYYAVTQDAMLIFENLSRGFGRQGKRTFMAERQYTRMEDWLTAKLAYEGLPSKTYLSKTLAQYTSKTCSNCGFTITSADYDRVLEKLKKTATGWMTTINGKELKVEGQITYYNRYKRQNVVKDLSVELDRLSEESVNNDISSWTKGRSGEALSLLKKRFSHRPVQEKFVCLNCGFETHADEQAALNIARSWLFLRSQEYKKYQTNKTTGNTDKRAFVETWQSFYRKKLKEVWKPAV

SEQ ID NO: 258 - protein, 979 aa, synthetic construct
QEIKRINKIRRRLVKDSNTKKAGKTGPMKTLLVRVMTPDLRERLENLRKKPENIPQPISNTSRANLNKLLTDYTEMKKAILHVYWEEFQKDPVGLMSRVAQPASKKIDQNKLKPEMDEKGNLTTAGFACSQCGQPLFVYKLEQVSEKGKAYTNYFGRCNVAEHEKLILLAQLKPEKDSDEAVTYSLGKFGQRALDFYSIHVTKESTHPVKPLAQIAGNRYASGPVGKALSDACMGTIASFLSKYQDIIIEHQKVVKGNQKRLESLRELAGKENLEYPSVTLPPQPHTKEGVDAYNEVIARVRMWVNLNLWQKLKLSRDDAKPLLRLKGFPSFPLVERQANEVDWWDMVCNVKKLINEKKEDGKVFWQNLAGYKRQEALRPYLSSEEDRKKGKKFARYQLGDLLLHLEKKHGEDWGKVYDEAWERIDKKVEGLSKHIKLEEERRSEDAQSKAALTDWLRAKASFVIERGLKEADKDEFCRCELKLQKWYGDLRGKPFAIEAENSILDISGFSKQYNCAFIWQKDGVKKLNLYLIINYFKGGKLRFKKIKPEAFEANRFYTVINKKSGEIVPMEVNFNFDDPNLIILPLAFGKRQGREFIWNDLLSLETGSLKLANGRVIEKTLYNRRTRQDEPALFVALTFERREVLDSSNIKPMNLIGVDRGENIPAVIALTDPEGCPLSRFKDSLGNPTHILRIGESYKEKQRTIQAKKEVEQRRAGGYSRKYASKAKNLADDMVRNTARDLLYYAVTQDAMLIFENLSRGFGRQGKRTFMAERQYTRMEDWLTAKLAYEGLPSKTYLSKTLAQYTSKTCSNCGFTITSADYDRVLEKLKKTATGWMTTINGKELKVEGQITYYNRYKRQNVVKDLSVELDRLSEESVNNDISSWTKGRSGEALSLLKKRFSHRPVQEKFVCLNCGFETHADEQAALNIARSWLFLRSQEYKKYQTNKTTGNTDKRAFVETWQSFYRKKLKEVWKPAV

SEQ ID NO: 259 - protein, 978 aa, synthetic construct
QEIKRINKIRRRLVKDSNTKKAGKTGPMKTLLVRVMTPDLRERLENLRKKPENIPQPISNTSRANLNKLLTDYTEMKKAILHVYWEEFQKDPVGLMSRVAQPASKKIDQNKLKPEMDEKGNLTTAGFACSQCGQPLFVYKLEQVSEKGKAYTNYFGRCNVAEHEKLILLAQLKPEKDSDEAVTYSLGKFGQRALDFYSIHVTKESTHPVKPLAQIAGNRYASGPVGKALSDACMGTIASFLSKYQDIIIEHQKVVKGNQKRLESLRELAGKENLEYPSVTLPPQPHTKEGVDAYNEVIARVRMWVNLNLWQKLKLSRDDAKPLLRLKGFPSFPLVERQANEVDWWDMVCNVKKLINEKKEDGKVFWQNLAGYKRQEALRPYLSSEEDRKKGKKFARYQLGDLLLHLEKKHGEDWGKVYDEAWERIDKKVEGLSKHIKLEEERRSEDAQSKAALTDWLRAKASFVIEGKKEADKDEFCRCELKLQKWYGDLRGKPFAIEAENSILDISGFSKQYNCAFIWQKDGVKKLNLYLIINYFKGGKLRFKKIKPEAFEANRFYTVINKKSGEIVPMEVNFNFDDPNLIILPLAFGKRQGREFIWNDLLSLETGSLKLANGRVIEKTLYNRRTRQDEPALFVALTFERREVLDSSNIKPMNLIGVDRGENIPAVIALTDPEGCPLSRFKDSLGNPTHILRIGESYKEKQRTIQAKKEVEQRRAGGYSRKYASKAKNLADDMVRNTARDLLYYAVTQDAMLIFENLSRGFGRQGKRTFMAERQYTRMEDWLTAKLAYEGLPSKTYLSKTLAQYTSKTCSNCGFTITSADYDRVLEKLKKTATGWMTTINGKELKVEGQITYYNRYKRQNVVKDLSVELDRLSEESVNNDISSWTKGRSGEALSLLKKRFSHRPVQEKFVCLNCGFETHADEQAALNIARSWLFLRSQEYKKYQTNKTTGNTDKRAFVETWQSFYRKKLKEVWKPAV

SEQ ID NO: 260 - protein, 978 aa, synthetic construct
QEIKRINKIRRRLVKDSNTKKAGKTGPMKTLLVRVMTPDLRERLENLRKKPENIPQPISNTSRANLNKLLTDYTEMKKAILHVYWEEFQKDPVGLMSRVAQPASKKIDQNKLKPEMDEKGNLTTAGFACSQCGQPLFVYKLEQVSEKGKAYTNYFGRCNVAEHEKLILLAQLKPEKDSDEAVTYSLGKFGQRALDFYSIHVTKESTHPVKPLAQIAGNRYASGPVGKALSDACMGTIASFLSKYQDIIIEHQKVVKGNQKRLESLRELAGKENLEYPSVTLPPQPHTKEGVDAYNEVIARVRMWVNLNLWQKLKLSRDDAKPLLRLKGFPSFPLVERQANEVDWWDMVCNVKKLINEKKEDGKVFWQNLAGYKRQEALRPYLSSEEDRKKGKKFARYQLGDLLLHLEKKHGEDWGKVYDEAWERIDKKVEGLSKHIKLEEERRSEDAQSKAALTDWLRAKASFVIEGSKEADKDEFCRCELKLQKWYGDLRGKPFAIEAENSILDISGFSKQYNCAFIWQKDGVKKLNLYLIINYFKGGKLRFKKIKPEAFEANRFYTVINKKSGEIVPMEVNFNFDDPNLIILPLAFGKRQGREFIWNDLLSLETGSLKLANGRVIEKTLYNRRTRQDEPALFVALTFERREVLDSSNIKPMNLIGVDRGENIPAVIALTDPEGCPLSRFKDSLGNPTHILRIGESYKEKQRTIQAKKEVEQRRAGGYSRKYASKAKNLADDMVRNTARDLLYYAVTQDAMLIFENLSRGFGRQGKRTFMAERQYTRMEDWLTAKLAYEGLPSKTYLSKTLAQYTSKTCSNCGFTITSADYDRVLEKLKKTATGWMTTINGKELKVEGQITYYNRYKRQNVVKDLSVELDRLSEESVNNDISSWTKGRSGEALSLLKKRFSHRPVQEKFVCLNCGFETHADEQAALNIARSWLFLRSQEYKKYQTNKTTGNTDKRAFVETWQSFYRKKLKEVWKPAV

SEQ ID NO: 261 - protein, 979 aa, synthetic construct
QEIKRINKIRRRLVKDSNTKKAGKTGPMKTLLVRVMTPDLRERLENLRKKPENIPQPISNTSRANLNKLLTDYTEMKKAILHVYWEEFQKDPVGLMSRVAQPASKKIDQNKLKPEMDEKGNLTTAGFACSQCGQPLFVYKLEQVSEKGKAYTNYFGRCNVAEHEKLILLAQLKPEKDSDEAVTYSLGKFGQRALDFYSIHVTKESTHPVKPLAQIAGNRYASGPVGKALSDACMGTIASFLSKYQDIIIEHQKVVKGNQKRLESLRELAGKENLEYPSVTLPPQPHTKEGVDAYNEVIARVRMWVNLNLWQKLKLSRDDAKPLLRLKGFPSFPLVERQANEVDWWDMVCNVKKLINEKKEDGKVFWQNLAGYKRQEALRPYLSSEEDRKKGKKFARYQLGDLLLHLEKKHGEDWGKVYDEAWERIDKKVEGLSKHIKLEEERRSEDAQSKAALTDWLRAKASFVIEGLKEADDKDEFCRCELKLQKWYGDLRGKPFAIEAENSILDISGFSKQYNCAFIWQKDGVKKLNLYLIINYFKGGKLRFKKIKPEAFEANRFYTVINKKSGEIVPMEVNFNFDDPNLIILPLAFGKRQGREFIWNDLLSLETGSLKLANGRVIEKTLYNRRTRQDEPALFVALTFERREVLDSSNIKPMNLIGVDRGENIPAVIALTDPEGCPLSRFKDSLGNPTHILRIGESYKEKQRTIQAKKEVEQRRAGGYSRKYASKAKNLADDMVRNTARDLLYYAVTQDAMLIFENLSRGFGRQGKRTFMAERQYTRMEDWLTAKLAYEGLPSKTYLSKTLAQYTSKTCSNCGFTITSADYDRVLEKLKKTATGWMTTINGKELKVEGQITYYNRYKRQNVVKDLSVELDRLSEESVNNDISSWTKGRSGEALSLLKKRFSHRPVQEKFVCLNCGFETHADEQAALNIARSWLFLRSQEYKKYQTNKTTGNTDKRAFVETWQSFYRKKLKEVWKPAV

SEQ ID NO: 262 - protein, 979 aa, synthetic construct
QEIKRINKIRRRLVKDSNTKKAGKTGPMKTLLVRVMTPDLRERLENLRKKPENIPQPISNTSRANLNKLLTDYTEMKKAILHVYWEEFQKDPVGLMSRVAQPASKKIDQNKLKPEMDEKGNLTTAGFACSQCGQPLFVYKLEQVSEKGKAYTNYFGRCNVAEHEKLILLAQLKPEKDSDEAVTYSLGKFGQRALDFYSIHVTKESTHPVKPLAQIAGNRYASGPVGKALSDACMGTIASFLSKYQDIIIEHQKVVKGNQKRLESLRELAGKENLEYPSVTLPPQPHTKEGVDAYNEVIARVRMWVNLNLWQKLKLSRDDAKPLLRLKGFPSFPLVERQANEVDWWDMVCNVKKLINEKKEDGKVFWQNLAGYKRQEALRPYLSSEEDRKKGKKFARYQLGDLLLHLEKKHGEDWGKVYDEAWERIDKKVEGLSKHIKLEEERRSEDAQSKAALTDWLRAKASFVIEGLKEADKDQEFCRCELKLQKWYGDLRGKPFAIEAENSILDISGFSKQYNCAFIWQKDGVKKLNLYLIINYFKGGKLRFKKIKPEAFEANRFYTVINKKSGEIVPMEVNFNFDDPNLIILPLAFGKRQGREFIWNDLLSLETGSLKLANGRVIEKTLYNRRTRQDEPALFVALTFERREVLDSSNIKPMNLIGVDRGENIPAVIALTDPEGCPLSRFKDSLGNPTHILRIGESYKEKQRTIQAKKEVEQRRAGGYSRKYASKAKNLADDMVRNTARDLLYYAVTQDAMLIFENLSRGFGRQGKRTFMAERQYTRMEDWLTAKLAYEGLPSKTYLSKTLAQYTSKTCSNCGFTITSADYDRVLEKLKKTATGWMTTINGKELKVEGQITYYNRYKRQNVVKDLSVELDRLSEESVNNDISSWTKGRSGEALSLLKKRFSHRPVQEKFVCLNCGFETHADEQAALNIARSWLFLRSQEYKKYQTNKTTGNTDKRAFVETWQSFYRKKLKEVWKPAV

SEQ ID NO: 263 - protein, 978 aa, synthetic construct
QEIKRINKIRRRLVKDSNTKKAGKTGPMKTLLVRVMTPDLRERLENLRKKPENIPQPISNTSRANLNKLLTDYTEMKKAILHVYWEEFQKDPVGLMSRVAQPASKKIDQNKLKPEMDEKGNLTTAGFACSQCGQPLFVYKLEQVSEKGKAYTNYFGRCNVAEHEKLILLAQLKPEKDSDEAVTYSLGKFGQRALDFYSIHVTKESTHPVKPLAQIAGNRYASGPVGKALSDACMGTIASFLSKYQDIIIEHQKVVKGNQKRLESLRELAGKENLEYPSVTLPPQPHTKEGVDAYNEVIARVRMWVNLNLWQKLKLSRDDAKPLLRLKGFPSFPLVERQANEVDWWDMVCNVKKLINEKKEDGKVFWQNLAGYKRQEALRPYLSSEEDRKKGKKFARYQLGDLLLHLEKKHGEDWGKVYDEAWERIDKKVEGLSKHIKLEEERRSEDAQSKAALTDWLRAKASFVIEGLKEADKDEKCRCELKLQKWYGDLRGKPFAIEAENSILDISGFSKQYNCAFIWQKDGVKKLNLYLIINYFKGGKLRFKKIKPEAFEANRFYTVINKKSGEIVPMEVNFNFDDPNLIILPLAFGKRQGREFIWNDLLSLETGSLKLANGRVIEKTLYNRRTRQDEPALFVALTFERREVLDSSNIKPMNLIGVDRGENIPAVIALTDPEGCPLSRFKDSLGNPTHILRIGESYKEKQRTIQAKKEVEQRRAGGYSRKYASKAKNLADDMVRNTARDLLYYAVTQDAMLIFENLSRGFGRQGKRTFMAERQYTRMEDWLTAKLAYEGLPSKTYLSKTLAQYTSKTCSNCGFTITSADYDRVLEKLKKTATGWMTTINGKELKVEGQITYYNRYKRQNVVKDLSVELDRLSEESVNNDISSWTKGRSGEALSLLKKRFSHRPVQEKFVCLNCGFETHADEQAALNIARSWLFLRSQEYKKYQTNKTTGNTDKRAFVETWQSFYRKKLKEVWKPAV

SEQ ID NO: 264 - protein, 978 aa, synthetic construct
QEIKRINKIRRRLVKDSNTKKAGKTGPMKTLLVRVMTPDLRERLENLRKKPENIPQPISNTSRANLNKLLTDYTEMKKAILHVYWEEFQKDPVGLMSRVAQPASKKIDQNKLKPEMDEKGNLTTAGFACSQCGQPLFVYKLEQVSEKGKAYTNYFGRCNVAEHEKLILLAQLKPEKDSDEAVTYSLGKFGQRALDFYSIHVTKESTHPVKPLAQIAGNRYASGPVGKALSDACMGTIASFLSKYQDIIIEHQKVVKGNQKRLESLRELAGKENLEYPSVTLPPQPHTKEGVDAYNEVIARVRMWVNLNLWQKLKLSRDDAKPLLRLKGFPSFPLVERQANEVDWWDMVCNVKKLINEKKEDGKVFWQNLAGYKRQEALRPYLSSEEDRKKGKKFARYQLGDLLLHLEKKHGEDWGKVYDEAWERIDKKVEGLSKHIKLEEERRSEDAQSKAALTDWLRAKASFVIEGLKEADKDEFCRDELKLQKWYGDLRGKPFAIEAENSILDISGFSKQYNCAFIWQKDGVKKLNLYLIINYFKGGKLRFKKIKPEAFEANRFYTVINKKSGEIVPMEVNFNFDDPNLIILPLAFGKRQGREFIWNDLLSLETGSLKLANGRVIEKTLYNRRTRQDEPALFVALTFERREVLDSSNIKPMNLIGVDRGENIPAVIALTDPEGCPLSRFKDSLGNPTHILRIGESYKEKQRTIQAKKEVEQRRAGGYSRKYASKAKNLADDMVRNTARDLLYYAVTQDAMLIFENLSRGFGRQGKRTFMAERQYTRMEDWLTAKLAYEGLPSKTYLSKTLAQYTSKTCSNCGFTITSADYDRVLEKLKKTATGWMTTINGKELKVEGQITYYNRYKRQNVVKDLSVELDRLSEESVNNDISSWTKGRSGEALSLLKKRFSHRPVQEKFVCLNCGFETHADEQAALNIARSWLFLRSQEYKKYQTNKTTGNTDKRAFVETWQSFYRKKLKEVWKPAV

SEQ ID NO: 265 - protein, 979 aa, synthetic construct
QEIKRINKIRRRLVKDSNTKKAGKTGPMKTLLVRVMTPDLRERLENLRKKPENIPQPISNTSRANLNKLLTDYTEMKKAILHVYWEEFQKDPVGLMSRVAQPASKKIDQNKLKPEMDEKGNLTTAGFACSQCGQPLFVYKLEQVSEKGKAYTNYFGRCNVAEHEKLILLAQLKPEKDSDEAVTYSLGKFGQRALDFYSIHVTKESTHPVKPLAQIAGNRYASGPVGKALSDACMGTIASFLSKYQDIIIEHQKVVKGNQKRLESLRELAGKENLEYPSVTLPPQPHTKEGVDAYNEVIARVRMWVNLNLWQKLKLSRDDAKPLLRLKGFPSFPLVERQANEVDWWDMVCNVKKLINEKKEDGKVFWQNLAGYKRQEALRPYLSSEEDRKKGKKFARYQLGDLLLHLEKKHGEDWGKVYDEAWERIDKKVEGLSKHIKLEEERRSEDAQSKAALTDWLRAKASFVIEGLKEADKDEFCRCVELKLQKWYGDLRGKPFAIEAENSILDISGFSKQYNCAFIWQKDGVKKLNLYLIINYFKGGKLRFKKIKPEAFEANRFYTVINKKSGEIVPMEVNFNFDDPNLIILPLAFGKRQGREFIWNDLLSLETGSLKLANGRVIEKTLYNRRTRQDEPALFVALTFERREVLDSSNIKPMNLIGVDRGENIPAVIALTDPEGCPLSRFKDSLGNPTHILRIGESYKEKQRTIQAKKEVEQRRAGGYSRKYASKAKNLADDMVRNTARDLLYYAVTQDAMLIFENLSRGFGRQGKRTFMAERQYTRMEDWLTAKLAYEGLPSKTYLSKTLAQYTSKTCSNCGFTITSADYDRVLEKLKKTATGWMTTINGKELKVEGQITYYNRYKRQNVVKDLSVELDRLSEESVNNDISSWTKGRSGEALSLLKKRFSHRPVQEKFVCLNCGFETHADEQAALNIARSWLFLRSQEYKKYQTNKTTGNTDKRAFVETWQSFYRKKLKEVWKPAV

SEQ ID NO: 266 - protein, 978 aa, synthetic construct
QEIKRINKIRRRLVKDSNTKKAGKTGPMKTLLVRVMTPDLRERLENLRKKPENIPQPISNTSRANLNKLLTDYTEMKKAILHVYWEEFQKDPVGLMSRVAQPASKKIDQNKLKPEMDEKGNLTTAGFACSQCGQPLFVYKLEQVSEKGKAYTNYFGRCNVAEHEKLILLAQLKPEKDSDEAVTYSLGKFGQRALDFYSIHVTKESTHPVKPLAQIAGNRYASGPVGKALSDACMGTIASFLSKYQDIIIEHQKVVKGNQKRLESLRELAGKENLEYPSVTLPPQPHTKEGVDAYNEVIARVRMWVNLNLWQKLKLSRDDAKPLLRLKGFPSFPLVERQANEVDWWDMVCNVKKLINEKKEDGKVFWQNLAGYKRQEALRPYLSSEEDRKKGKKFARYQLGDLLLHLEKKHGEDWGKVYDEAWERIDKKVEGLSKHIKLEEERRSEDAQSKAALTDWLRAKASFVIEGLKEADKDEFCRCDLKLQKWYGDLRGKPFAIEAENSILDISGFSKQYNCAFIWQKDGVKKLNLYLIINYFKGGKLRFKKIKPEAFEANRFYTVINKKSGEIVPMEVNFNFDDPNLIILPLAFGKRQGREFIWNDLLSLETGSLKLANGRVIEKTLYNRRTRQDEPALFVALTFERREVLDSSNIKPMNLIGVDRGENIPAVIALTDPEGCPLSRFKDSLGNPTHILRIGESYKEKQRTIQAKKEVEQRRAGGYSRKYASKAKNLADDMVRNTARDLLYYAVTQDAMLIFENLSRGFGRQGKRTFMAERQYTRMEDWLTAKLAYEGLPSKTYLSKTLAQYTSKTCSNCGFTITSADYDRVLEKLKKTATGWMTTINGKELKVEGQITYYNRYKRQNVVKDLSVELDRLSEESVNNDISSWTKGRSGEALSLLKKRFSHRPVQEKFVCLNCGFETHADEQAALNIARSWLFLRSQEYKKYQTNKTTGNTDKRAFVETWQSFYRKKLKEVWKPAV

SEQ ID NO: 267 - protein, 978 aa, synthetic construct
QEIKRINKIRRRLVKDSNTKKAGKTGPMKTLLVRVMTPDLRERLENLRKKPENIPQPISNTSRANLNKLLTDYTEMKKAILHVYWEEFQKDPVGLMSRVAQPASKKIDQNKLKPEMDEKGNLTTAGFACSQCGQPLFVYKLEQVSEKGKAYTNYFGRCNVAEHEKLILLAQLKPEKDSDEAVTYSLGKFGQRALDFYSIHVTKESTHPVKPLAQIAGNRYASGPVGKALSDACMGTIASFLSKYQDIIIEHQKVVKGNQKRLESLRELAGKENLEYPSVTLPPQPHTKEGVDAYNEVIARVRMWVNLNLWQKLKLSRDDAKPLLRLKGFPSFPLVERQANEVDWWDMVCNVKKLINEKKEDGKVFWQNLAGYKRQEALRPYLSSEEDRKKGKKFARYQLGDLLLHLEKKHGEDWGKVYDEAWERIDKKVEGLSKHIKLEEERRSEDAQSKAALTDWLRAKASFVIEGLKEADKDEFCRCERKLQKWYGDLRGKPFAIEAENSILDISGFSKQYNCAFIWQKDGVKKLNLYLIINYFKGGKLRFKKIKPEAFEANRFYTVINKKSGEIVPMEVNFNFDDPNLIILPLAFGKRQGREFIWNDLLSLETGSLKLANGRVIEKTLYNRRTRQDEPALFVALTFERREVLDSSNIKPMNLIGVDRGENIPAVIALTDPEGCPLSRFKDSLGNPTHILRIGESYKEKQRTIQAKKEVEQRRAGGYSRKYASKAKNLADDMVRNTARDLLYYAVTQDAMLIFENLSRGFGRQGKRTFMAERQYTRMEDWLTAKLAYEGLPSKTYLSKTLAQYTSKTCSNCGFTITSADYDRVLEKLKKTATGWMTTINGKELKVEGQITYYNRYKRQNVVKDLSVELDRLSEESVNNDISSWTKGRSGEALSLLKKRFSHRPVQEKFVCLNCGFETHADEQAALNIARSWLFLRSQEYKKYQTNKTTGNTDKRAFVETWQSFYRKKLKEVWKPAV

SEQ ID NO: 268 - protein, 978 aa, synthetic construct
QEIKRINKIRRRLVKDSNTKKAGKTGPMKTLLVRVMTPDLRERLENLRKKPENIPQPISNTSRANLNKLLTDYTEMKKAILHVYWEEFQKDPVGLMSRVAQPASKKIDQNKLKPEMDEKGNLTTAGFACSQCGQPLFVYKLEQVSEKGKAYTNYFGRCNVAEHEKLILLAQLKPEKDSDEAVTYSLGKFGQRALDFYSIHVTKESTHPVKPLAQIAGNRYASGPVGKALSDACMGTIASFLSKYQDIIIEHQKVVKGNQKRLESLRELAGKENLEYPSVTLPPQPHTKEGVDAYNEVIARVRMWVNLNLWQKLKLSRDDAKPLLRLKGFPSFPLVERQANEVDWWDMVCNVKKLINEKKEDGKVFWQNLAGYKRQEALRPYLSSEEDRKKGKKFARYQLGDLLLHLEKKHGEDWGKVYDEAWERIDKKVEGLSKHIKLEEERRSEDAQSKAALTDWLRAKASFVIEGLKEADKDEFCRCELKHQKWYGDLRGKPFAIEAENSILDISGFSKQYNCAFIWQKDGVKKLNLYLIINYFKGGKLRFKKIKPEAFEANRFYTVINKKSGEIVPMEVNFNFDDPNLIILPLAFGKRQGREFIWNDLLSLETGSLKLANGRVIEKTLYNRRTRQDEPALFVALTFERREVLDSSNIKPMNLIGVDRGENIPAVIALTDPEGCPLSRFKDSLGNPTHILRIGESYKEKQRTIQAKKEVEQRRAGGYSRKYASKAKNLADDMVRNTARDLLYYAVTQDAMLIFENLSRGFGRQGKRTFMAERQYTRMEDWLTAKLAYEGLPSKTYLSKTLAQYTSKTCSNCGFTITSADYDRVLEKLKKTATGWMTTINGKELKVEGQITYYNRYKRQNVVKDLSVELDRLSEESVNNDISSWTKGRSGEALSLLKKRFSHRPVQEKFVCLNCGFETHADEQAALNIARSWLFLRSQEYKKYQTNKTTGNTDKRAFVETWQSFYRKKLKEVWKPAV

SEQ ID NO: 269 - protein, 978 aa, synthetic construct
QEIKRINKIRRRLVKDSNTKKAGKTGPMKTLLVRVMTPDLRERLENLRKKPENIPQPISNTSRANLNKLLTDYTEMKKAILHVYWEEFQKDPVGLMSRVAQPASKKIDQNKLKPEMDEKGNLTTAGFACSQCGQPLFVYKLEQVSEKGKAYTNYFGRCNVAEHEKLILLAQLKPEKDSDEAVTYSLGKFGQRALDFYSIHVTKESTHPVKPLAQIAGNRYASGPVGKALSDACMGTIASFLSKYQDIIIEHQKVVKGNQKRLESLRELAGKENLEYPSVTLPPQPHTKEGVDAYNEVIARVRMWVNLNLWQKLKLSRDDAKPLLRLKGFPSFPLVERQANEVDWWDMVCNVKKLINEKKEDGKVFWQNLAGYKRQEALRPYLSSEEDRKKGKKFARYQLGDLLLHLEKKHGEDWGKVYDEAWERIDKKVEGLSKHIKLEEERRSEDAQSKAALTDWLRAKASFVIEGLKEADKDEFCRCELKLQPWYGDLRGKPFAIEAENSILDISGFSKQYNCAFIWQKDGVKKLNLYLIINYFKGGKLRFKKIKPEAFEANRFYTVINKKSGEIVPMEVNFNFDDPNLIILPLAFGKRQGREFIWNDLLSLETGSLKLANGRVIEKTLYNRRTRQDEPALFVALTFERREVLDSSNIKPMNLIGVDRGENIPAVIALTDPEGCPLSRFKDSLGNPTHILRIGESYKEKQRTIQAKKEVEQRRAGGYSRKYASKAKNLADDMVRNTARDLLYYAVTQDAMLIFENLSRGFGRQGKRTFMAERQYTRMEDWLTAKLAYEGLPSKTYLSKTLAQYTSKTCSNCGFTITSADYDRVLEKLKKTATGWMTTINGKELKVEGQITYYNRYKRQNVVKDLSVELDRLSEESVNNDISSWTKGRSGEALSLLKKRFSHRPVQEKFVCLNCGFETHADEQAALNIARSWLFLRSQEYKKYQTNKTTGNTDKRAFVETWQSFYRKKLKEVWKPAV

SEQ ID NO: 270 - protein, 978 aa, synthetic construct; identical to SEQ ID NO: 182

SEQ ID NO: 271 - protein, 978 aa, synthetic construct
QEIKRINKIRRRLVKDSNTKKAGKTGPMKTLLVRVMTPDLRERLENLRKKPENIPQPISNTSRANLNKLLTDYTEMKKAILHVYWEEFQKDPVGLMSRVAQPASKKIDQNKLKPEMDEKGNLTTAGFACSQCGQPLFVYKLEQVSEKGKAYTNYFGRCNVAEHEKLILLAQLKPEKDSDEAVTYSLGKFGQRALDFYSIHVTKESTHPVKPLAQIAGNRYASGPVGKALSDACMGTIASFLSKYQDIIIEHQKVVKGNQKRLESLRELAGKENLEYPSVTLPPQPHTKEGVDAYNEVIARVRMWVNLNLWQKLKLSRDDAKPLLRLKGFPSFPLVERQANEVDWWDMVCNVKKLINEKKEDGKVFWQNLAGYKRQEALRPYLSSEEDRKKGKKFARYQLGDLLLHLEKKHGEDWGKVYDEAWERIDKKVEGLSKHIKLEEERRSEDAQSKAALTDWLRAKASFVIEGLKEADKDEFCRCELKLQKWYGDLRGKPFAIEAENSILDISGFSKQYNCAFIWQKDGVKKLNLYLIINYFKGGKLRFKKIKPEAFEANRFYTVINKKSGEIVPMEVNFNFDDPNLIILPLAFGKRFGREFIWNDLLSLETGSLKLANGRVIEKTLYNRRTRQDEPALFVALTFERREVLDSSNIKPMNLIGVDRGENIPAVIALTDPEGCPLSRFKDSLGNPTHILRIGESYKEKQRTIQAKKEVEQRRAGGYSRKYASKAKNLADDMVRNTARDLLYYAVTQDAMLIFENLSRGFGRQGKRTFMAERQYTRMEDWLTAKLAYEGLPSKTYLSKTLAQYTSKTCSNCGFTITSADYDRVLEKLKKTATGWMTTINGKELKVEGQITYYNRYKRQNVVKDLSVELDRLSEESVNNDISSWTKGRSGEALSLLKKRFSHRPVQEKFVCLNCGFETHADEQAALNIARSWLFLRSQEYKKYQTNKTTGNTDKRAFVETWQSFYRKKLKEVWKPAV

SEQ ID NO: 272 - protein, 978 aa, synthetic construct
QEIKRINKIRRRLVKDSNTKKAGKTGPMKTLLVRVMTPDLRERLENLRKKPENIPQPISNTSRANLNKLLTDYTEMKKAILHVYWEEFQKDPVGLMSRVAQPASKKIDQNKLKPEMDEKGNLTTAGFACSQCGQPLFVYKLEQVSEKGKAYTNYFGRCNVAEHEKLILLAQLKPEKDSDEAVTYSLGKFGQRALDFYSIHVTKESTHPVKPLAQIAGNRYASGPVGKALSDACMGTIASFLSKYQDIIIEHQKVVKGNQKRLESLRELAGKENLEYPSVTLPPQPHTKEGVDAYNEVIARVRMWVNLNLWQKLKLSRDDAKPLLRLKGFPSFPLVERQANEVDWWDMVCNVKKLINEKKEDGKVFWQNLAGYKRQEALRPYLSSEEDRKKGKKFARYQLGDLLLHLEKKHGEDWGKVYDEAWERIDKKVEGLSKHIKLEEERRSEDAQSKAALTDWLRAKASFVIEGLKEADKDEFCRCELKLQKWYGDLRGKPFAIEAENSILDISGFSKQYNCAFIWQKDGVKKLNLYLIINYFKGGKLRFKKIKPEAFEANRFYTVINKKSGEIVPMEVNFNFDDPNLIILPLAFGKRVGREFIWNDLLSLETGSLKLANGRVIEKTLYNRRTRQDEPALFVALTFERREVLDSSNIKPMNLIGVDRGENIPAVIALTDPEGCPLSRFKDSLGNPTHILRIGESYKEKQRTIQAKKEVEQRRAGGYSRKYASKAKNLADDMVRNTARDLLYYAVTQDAMLIFENLSRGFGRQGKRTFMAERQYTRMEDWLTAKLAYEGLPSKTYLSKTLAQYTSKTCSNCGFTITSADYDRVLEKLKKTATGWMTTINGKELKVEGQITYYNRYKRQNVVKDLSVELDRLSEESVNNDISSWTKGRSGEALSLLKKRFSHRPVQEKFVCLNCGFETHADEQAALNIARSWLFLRSQEYKKYQTNKTTGNTDKRAFVETWQSFYRKKLKEVWKPAV

SEQ ID NO: 273 - protein, 979 aa, synthetic construct
QEIKRINKIRRRLVKDSNTKKAGKTGPMKTLLVRVMTPDLRERLENLRKKPENIPQPISNTSRANLNKLLTDYTEMKKAILHVYWEEFQKDPVGLMSRVAQPASKKIDQNKLKPEMDEKGNLTTAGFACSQCGQPLFVYKLEQVSEKGKAYTNYFGRCNVAEHEKLILLAQLKPEKDSDEAVTYSLGKFGQRALDFYSIHVTKESTHPVKPLAQIAGNRYASGPVGKALSDACMGTIASFLSKYQDIIIEHQKVVKGNQKRLESLRELAGKENLEYPSVTLPPQPHTKEGVDAYNEVIARVRMWVNLNLWQKLKLSRDDAKPLLRLKGFPSFPLVERQANEVDWWDMVCNVKKLINEKKEDGKVFWQNLAGYKRQEALRPYLSSEEDRKKGKKFARYQLGDLLLHLEKKHGEDWGKVYDEAWERIDKKVEGLSKHIKLEEERRSEDAQSKAALTDWLRAKASFVIEGLKEADKDEFCRCELKLQKWYGDLRGKPFAIEAENSILDISGFSKQYNCAFIWQKDGVKKLNLYLIINYFKGGKLRFKKIKPEAFEANRFYTVINKKSGEIVPMEVNFNFDDPNLIILPLAFGKRQGREFIWNDLLSLETGSLKLANGRVIEKTLYNRRTRQDEPALFVALTFERREVLDSSNIIKPMNLIGVDRGENIPAVIALTDPEGCPLSRFKDSLGNPTHILRIGESYKEKQRTIQAKKEVEQRRAGGYSRKYASKAKNLADDMVRNTARDLLYYAVTQDAMLIFENLSRGFGRQGKRTFMAERQYTRMEDWLTAKLAYEGLPSKTYLSKTLAQYTSKTCSNCGFTITSADYDRVLEKLKKTATGWMTTINGKELKVEGQITYYNRYKRQNVVKDLSVELDRLSEESVNNDISSWTKGRSGEALSLLKKRFSHRPVQEKFVCLNCGFETHADEQAALNIARSWLFLRSQEYKKYQTNKTTGNTDKRAFVETWQSFYRKKLKEVWKPAV

SEQ ID NO: 274 - protein, 979 aa, synthetic construct
QEIKRINKIRRRLVKDSNTKKAGKTGPMKTLLVRVMTPDLRERLENLRKKPENIPQPISNTSRANLNKLLTDYTEMKKAILHVYWEEFQKDPVGLMSRVAQPASKKIDQNKLKPEMDEKGNLTTAGFACSQCGQPLFVYKLEQVSEKGKAYTNYFGRCNVAEHEKLILLAQLKPEKDSDEAVTYSLGKFGQRALDFYSIHVTKESTHPVKPLAQIAGNRYASGPVGKALSDACMGTIASFLSKYQDIIIEHQKVVKGNQKRLESLRELAGKENLEYPSVTLPPQPHTKEGVDAYNEVIARVRMWVNLNLWQKLKLSRDDAKPLLRLKGFPSFPLVERQANEVDWWDMVCNVKKLINEKKEDGKVFWQNLAGYKRQEALRPYLSSEEDRKKGKKFARYQLGDLLLHLEKKHGEDWGKVYDEAWERIDKKVEGLSKHIKLEEERRSEDAQSKAALTDWLRAKASFVIEGLKEADKDEFCRCELKLQKWYGDLRGKPFAIEAENSILDISGFSKQYNCAFIWQKDGVKKLNLYLIINYFKGGKLRFKKIKPEAFEANRFYTVINKKSGEIVPMEVNFNFDDPNLIILPLAFGKRQGREFIWNDLLSLETGSLKLANGRVIEKTLYNRRTRQDEPALFVALTFERREVLDSSNIKTPMNLIGVDRGENIPAVIALTDPEGCPLSRFKDSLGNPTHILRIGESYKEKQRTIQAKKEVEQRRAGGYSRKYASKAKNLADDMVRNTARDLLYYAVTQDAMLIFENLSRGFGRQGKRTFMAERQYTRMEDWLTAKLAYEGLPSKTYLSKTLAQYTSKTCSNCGFTITSADYDRVLEKLKKTATGWMTTINGKELKVEGQITYYNRYKRQNVVKDLSVELDRLSEESVNNDISSWTKGRSGEALSLLKKRFSHRPVQEKFVCLNCGFETHADEQAALNIARSWLFLRSQEYKKYQTNKTTGNTDKRAFVETWQSFYRKKLKEVWKPAV

SEQ ID NO: 275 - protein, 979 aa, synthetic construct
QEIKRINKIRRRLVKDSNTKKAGKTGPMKTLLVRVMTPDLRERLENLRKKPENIPQPISNTSRANLNKLLTDYTEMKKAILHVYWEEFQKDPVGLMSRVAQPASKKIDQNKLKPEMDEKGNLTTAGFACSQCGQPLFVYKLEQVSEKGKAYTNYFGRCNVAEHEKLILLAQLKPEKDSDEAVTYSLGKFGQRALDFYSIHVTKESTHPVKPLAQIAGNRYASGPVGKALSDACMGTIASFLSKYQDIIIEHQKVVKGNQKRLESLRELAGKENLEYPSVTLPPQPHTKEGVDAYNEVIARVRMWVNLNLWQKLKLSRDDAKPLLRLKGFPSFPLVERQANEVDWWDMVCNVKKLINEKKEDGKVFWQNLAGYKRQEALRPYLSSEEDRKKGKKFARYQLGDLLLHLEKKHGEDWGKVYDEAWERIDKKVEGLSKHIKLEEERRSEDAQSKAALTDWLRAKASFVIEGLKEADKDEFCRCELKLQKWYGDLRGKPFAIEAENSILDISGFSKQYNCAFIWQKDGVKKLNLYLIINYFKGGKLRFKKIKPEAFEANRFYTVINKKSGEIVPMEVNFNFDDPNLIILPLAFGKRQGREFIWNDLLSLETGSLKLANGRVIEKTLYNRRTRQDEPALFVALTFERREVLDSSNIKNPMNLIGVDRGENIPAVIALTDPEGCPLSRFKDSLGNPTHILRIGESYKEKQRTIQAKKEVEQRRAGGYSRKYASKAKNLADDMVRNTARDLLYYAVTQDAMLIFENLSRGFGRQGKRTFMAERQYTRMEDWLTAKLAYEGLPSKTYLSKTLAQYTSKTCSNCGFTITSADYDRVLEKLKKTATGWMTTINGKELKVEGQITYYNRYKRQNVVKDLSVELDRLSEESVNNDISSWTKGRSGEALSLLKKRFSHRPVQEKFVCLNCGFETHADEQAALNIARSWLFLRSQEYKKYQTNKTTGNTDKRAFVETWQSFYRKKLKEVWKPAV

SEQ ID NO: 276 - protein, 979 aa, synthetic construct
QEIKRINKIRRRLVKDSNTKKAGKTGPMKTLLVRVMTPDLRERLENLRKKPENIPQPISNTSRANLNKLLTDYTEMKKAILHVYWEEFQKDPVGLMSRVAQPASKKIDQNKLKPEMDEKGNLTTAGFACSQCGQPLFVYKLEQVSEKGKAYTNYFGRCNVAEHEKLILLAQLKPEKDSDEAVTYSLGKFGQRALDFYSIHVTKESTHPVKPLAQIAGNRYASGPVGKALSDACMGTIASFLSKYQDIIIEHQKVVKGNQKRLESLRELAGKENLEYPSVTLPPQPHTKEGVDAYNEVIARVRMWVNLNLWQKLKLSRDDAKPLLRLKGFPSFPLVERQANEVDWWDMVCNVKKLINEKKEDGKVFWQNLAGYKRQEALRPYLSSEEDRKKGKKFARYQLGDLLLHLEKKHGEDWGKVYDEAWERIDKKVEGLSKHIKLEEERRSEDAQSKAALTDWLRAKASFVIEGLKEADKDEFCRCELKLQKWYGDLRGKPFAIEAENSILDISGFSKQYNCAFIWQKDGVKKLNLYLIINYFKGGKLRFKKIKPEAFEANRFYTVINKKSGEIVPMEVNFNFDDPNLIILPLAFGKRQGREFIWNDLLSLETGSLKLANGRVIEKTLYNRRTRQDEPALFVALTFERREVLDSSNIKPRMNLIGVDRGENIPAVIALTDPEGCPLSRFKDSLGNPTHILRIGESYKEKQRTIQAKKEVEQRRAGGYSRKYASKAKNLADDMVRNTARDLLYYAVTQDAMLIFENLSRGFGRQGKRTFMAERQYTRMEDWLTAKLAYEGLPSKTYLSKTLAQYTSKTCSNCGFTITSADYDRVLEKLKKTATGWMTTINGKELKVEGQITYYNRYKRQNVVKDLSVELDRLSEESVNNDISSWTKGRSGEALSLLKKRFSHRPVQEKFVCLNCGFETHADEQAALNIARSWLFLRSQEYKKYQTNKTTGNTDKRAFVETWQSFYRKKLKEVWKPAV

SEQ ID NO: 277 - protein, 979 aa, synthetic construct
QEIKRINKIRRRLVKDSNTKKAGKTGPMKTLLVRVMTPDLRERLENLRKKPENIPQPISNTSRANLNKLLTDYTEMKKAILHVYWEEFQKDPVGLMSRVAQPASKKIDQNKLKPEMDEKGNLTTAGFACSQCGQPLFVYKLEQVSEKGKAYTNYFGRCNVAEHEKLILLAQLKPEKDSDEAVTYSLGKFGQRALDFYSIHVTKESTHPVKPLAQIAGNRYASGPVGKALSDACMGTIASFLSKYQDIIIEHQKVVKGNQKRLESLRELAGKENLEYPSVTLPPQPHTKEGVDAYNEVIARVRMWVNLNLWQKLKLSRDDAKPLLRLKGFPSFPLVERQANEVDWWDMVCNVKKLINEKKEDGKVFWQNLAGYKRQEALRPYLSSEEDRKKGKKFARYQLGDLLLHLEKKHGEDWGKVYDEAWERIDKKVEGLSKHIKLEEERRSEDAQSKAALTDWLRAKASFVIEGLKEADKDEFCRCELKLQKWYGDLRGKPFAIEAENSILDISGFSKQYNCAFIWQKDGVKKLNLYLIINYFKGGKLRFKKIKPEAFEANRFYTVINKKSGEIVPMEVNFNFDDPNLIILPLAFGKRQGREFIWNDLLSLETGSLKLANGRVIEKTLYNRRTRQDEPALFVALTFERREVLDSSNIKPMSNLIGVDRGENIPAVIALTDPEGCPLSRFKDSLGNPTHILRIGESYKEKQRTIQAKKEVEQRRAGGYSRKYASKAKNLADDMVRNTARDLLYYAVTQDAMLIFENLSRGFGRQGKRTFMAERQYTRMEDWLTAKLAYEGLPSKTYLSKTLAQYTSKTCSNCGFTITSADYDRVLEKLKKTATGWMTTINGKELKVEGQITYYNRYKRQNVVKDLSVELDRLSEESVNNDISSWTKGRSGEALSLLKKRFSHRPVQEKFVCLNCGFETHADEQAALNIARSWLFLRSQEYKKYQTNKTTGNTDKRAFVETWQSFYRKKLKEVWKPAV

SEQ ID NO: 278 - protein, 978 aa, synthetic construct
QEIKRINKIRRRLVKDSNTKKAGKTGPMKTLLVRVMTPDLRERLENLRKKPENIPQPISNTSRANLNKLLTDYTEMKKAILHVYWEEFQKDPVGLMSRVAQPASKKIDQNKLKPEMDEKGNLTTAGFACSQCGQPLFVYKLEQVSEKGKAYTNYFGRCNVAEHEKLILLAQLKPEKDSDEAVTYSLGKFGQRALDFYSIHVTKESTHPVKPLAQIAGNRYASGPVGKALSDACMGTIASFLSKYQDIIIEHQKVVKGNQKRLESLRELAGKENLEYPSVTLPPQPHTKEGVDAYNEVIARVRMWVNLNLWQKLKLSRDDAKPLLRLKGFPSFPLVERQANEVDWWDMVCNVKKLINEKKEDGKVFWQNLAGYKRQEALRPYLSSEEDRKKGKKFARYQLGDLLLHLEKKHGEDWGKVYDEAWERIDKKVEGLSKHIKLEEERRSEDAQSKAALTDWLRAKASFVIEGLKEADKDEFCRCELKLQKWYGDLRGKPFAIEAENSILDISGFSKQYNCAFIWQKDGVKKLNLYLIINYFKGGKLRFKKIKPEAFEANRFYTVINKKSGEIVPMEVNFNFDDPNLIILPLAFGKRQGREFIWNDLLSLETGSLKLANGRVIEKTLYNRRTRQDEPALFVALTFERREVLDSSNIKPMNLIGVDRGENIPAVIALTDPEGCPLSRFKDSLGNPTHILRIWESYKEKQRTIQAKKEVEQRRAGGYSRKYASKAKNLADDMVRNTARDLLYYAVTQDAMLIFENLSRGFGRQGKRTFMAERQYTRMEDWLTAKLAYEGLPSKTYLSKTLAQYTSKTCSNCGFTITSADYDRVLEKLKKTATGWMTTINGKELKVEGQITYYNRYKRQNVVKDLSVELDRLSEESVNNDISSWTKGRSGEALSLLKKRFSHRPVQEKFVCLNCGFETHADEQAALNIARSWLFLRSQEYKKYQTNKTTGNTDKRAFVETWQSFYRKKLKEVWKPAV

SEQ ID NO: 279 - protein, 978 aa, synthetic construct
QEIKRINKIRRRLVKDSNTKKAGKTGPMKTLLVRVMTPDLRERLENLRKKPENIPQPISNTSRANLNKLLTDYTEMKKAILHVYWEEFQKDPVGLMSRVAQPASKKIDQNKLKPEMDEKGNLTTAGFACSQCGQPLFVYKLEQVSEKGKAYTNYFGRCNVAEHEKLILLAQLKPEKDSDEAVTYSLGKFGQRALDFYSIHVTKESTHPVKPLAQIAGNRYASGPVGKALSDACMGTIASFLSKYQDIIIEHQKVVKGNQKRLESLRELAGKENLEYPSVTLPPQPHTKEGVDAYNEVIARVRMWVNLNLWQKLKLSRDDAKPLLRLKGFPSFPLVERQANEVDWWDMVCNVKKLINEKKEDGKVFWQNLAGYKRQEALRPYLSSEEDRKKGKKFARYQLGDLLLHLEKKHGEDWGKVYDEAWERIDKKVEGLSKHIKLEEERRSEDAQSKAALTDWLRAKASFVIEGLKEADKDEFCRCELKLQKWYGDLRGKPFAIEAENSILDISGFSKQYNCAFIWQKDGVKKLNLYLIINYFKGGKLRFKKIKPEAFEANRFYTVINKKSGEIVPMEVNFNFDDPNLIILPLAFGKRQGREFIWNDLLSLETGSLKLANGRVIEKTLYNRRTRQDEPALFVALTFERREVLDSSNIKPMNLIGVDRGENIPAVIALTDPEGCPLSRFKDSLGNPTHILRIRESYKEKQRTIQAKKEVEQRRAGGYSRKYASKAKNLADDMVRNTARDLLYYAVTQDAMLIFENLSRGFGRQGKRTFMAERQYTRMEDWLTAKLAYEGLPSKTYLSKTLAQYTSKTCSNCGFTITSADYDRVLEKLKKTATGWMTTINGKELKVEGQITYYNRYKRQNVVKDLSVELDRLSEESVNNDISSWTKGRSGEALSLLKKRFSHRPVQEKFVCLNCGFETHADEQAALNIARSWLFLRSQEYKKYQTNKTTGNTDKRAFVETWQSFYRKKLKEVWKPAV

SEQ ID NO: 280 - protein, 978 aa, synthetic construct
QEIKRINKIRRRLVKDSNTKKAGKTGPMKTLLVRVMTPDLRERLENLRKKPENIPQPISNTSRANLNKLLTDYTEMKKAILHVYWEEFQKDPVGLMSRVAQPASKKIDQNKLKPEMDEKGNLTTAGFACSQCGQPLFVYKLEQVSEKGKAYTNYFGRCNVAEHEKLILLAQLKPEKDSDEAVTYSLGKFGQRALDFYSIHVTKESTHPVKPLAQIAGNRYASGPVGKALSDACMGTIASFLSKYQDIIIEHQKVVKGNQKRLESLRELAGKENLEYPSVTLPPQPHTKEGVDAYNEVIARVRMWVNLNLWQKLKLSRDDAKPLLRLKGFPSFPLVERQANEVDWWDMVCNVKKLINEKKEDGKVFWQNLAGYKRQEALRPYLSSEEDRKKGKKFARYQLGDLLLHLEKKHGEDWGKVYDEAWERIDKKVEGLSKHIKLEEERRSEDAQSKAALTDWLRAKASFVIEGLKEADKDEFCRCELKLQKWYGDLRGKPFAIEAENSILDISGFSKQYNCAFIWQKDGVKKLNLYLIINYFKGGKLRFKKIKPEAFEANRFYTVINKKSGEIVPMEVNFNFDDPNLIILPLAFGKRQGREFIWNDLLSLETGSLKLANGRVIEKTLYNRRTRQDEPALFVALTFERREVLDSSNIKPMNLIGVDRGENIPAVIALTDPEGCPLSRFKDSLGNPTHILRIGESYKEKQRTIQASKEVEQRRAGGYSRKYASKAKNLADDMVRNTARDLLYYAVTQDAMLIFENLSRGFGRQGKRTFMAERQYTRMEDWLTAKLAYEGLPSKTYLSKTLAQYTSKTCSNCGFTITSADYDRVLEKLKKTATGWMTTINGKELKVEGQITYYNRYKRQNVVKDLSVELDRLSEESVNNDISSWTKGRSGEALSLLKKRFSHRPVQEKFVCLNCGFETHADEQAALNIARSWLFLRSQEYKKYQTNKTTGNTDKRAFVETWQSFYRKKLKEVWKPAV

SEQ ID NO: 281 - protein, 978 aa, synthetic construct
QEIKRINKIRRRLVKDSNTKKAGKTGPMKTLLVRVMTPDLRERLENLRKKPENIPQPISNTSRANLNKLLTDYTEMKKAILHVYWEEFQKDPVGLMSRVAQPASKKIDQNKLKPEMDEKGNLTTAGFACSQCGQPLFVYKLEQVSEKGKAYTNYFGRCNVAEHEKLILLAQLKPEKDSDEAVTYSLGKFGQRALDFYSIHVTKESTHPVKPLAQIAGNRYASGPVGKALSDACMGTIASFLSKYQDIIIEHQKVVKGNQKRLESLRELAGKENLEYPSVTLPPQPHTKEGVDAYNEVIARVRMWVNLNLWQKLKLSRDDAKPLLRLKGFPSFPLVERQANEVDWWDMVCNVKKLINEKKEDGKVFWQNLAGYKRQEALRPYLSSEEDRKKGKKFARYQLGDLLLHLEKKHGEDWGKVYDEAWERIDKKVEGLSKHIKLEEERRSEDAQSKAALTDWLRAKASFVIEGLKEADKDEFCRCELKLQKWYGDLRGKPFAIEAENSILDISGFSKQYNCAFIWQKDGVKKLNLYLIINYFKGGKLRFKKIKPEAFEANRFYTVINKKSGEIVPMEVNFNFDDPNLIILPLAFGKRQGREFIWNDLLSLETGSLKLANGRVIEKTLYNRRTRQDEPALFVALTFERREVLDSSNIKPMNLIGVDRGENIPAVIALTDPEGCPLSRFKDSLGNPTHILRIGESYKEKQRTIQAKKEVEQRRAGGYSRKYASKAKNLADDMVHNTARDLLYYAVTQDAMLIFENLSRGFGRQGKRTFMAERQYTRMEDWLTAKLAYEGLPSKTYLSKTLAQYTSKTCSNCGFTITSADYDRVLEKLKKTATGWMTTINGKELKVEGQITYYNRYKRQNVVKDLSVELDRLSEESVNNDISSWTKGRSGEALSLLKKRFSHRPVQEKFVCLNCGFETHADEQAALNIARSWLFLRSQEYKKYQTNKTTGNTDKRAFVETWQSFYRKKLKEVWKPAV

SEQ ID NO: 282 - protein, 978 aa, synthetic construct
QEIKRINKIRRRLVKDSNTKKAGKTGPMKTLLVRVMTPDLRERLENLRKKPENIPQPISNTSRANLNKLLTDYTEMKKAILHVYWEEFQKDPVGLMSRVAQPASKKIDQNKLKPEMDEKGNLTTAGFACSQCGQPLFVYKLEQVSEKGKAYTNYFGRCNVAEHEKLILLAQLKPEKDSDEAVTYSLGKFGQRALDFYSIHVTKESTHPVKPLAQIAGNRYASGPVGKALSDACMGTIASFLSKYQDIIIEHQKVVKGNQKRLESLRELAGKENLEYPSVTLPPQPHTKEGVDAYNEVIARVRMWVNLNLWQKLKLSRDDAKPLLRLKGFPSFPLVERQANEVDWWDMVCNVKKLINEKKEDGKVFWQNLAGYKRQEALRPYLSSEEDRKKGKKFARYQLGDLLLHLEKKHGEDWGKVYDEAWERIDKKVEGLSKHIKLEEERRSEDAQSKAALTDWLRAKASFVIEGLKEADKDEFCRCELKLQKWYGDLRGKPFAIEAENSILDISGFSKQYNCAFIWQKDGVKKLNLYLIINYFKGGKLRFKKIKPEAFEANRFYTVINKKSGEIVPMEVNFNFDDPNLIILPLAFGKRQGREFIWNDLLSLETGSLKLANGRVIEKTLYNRRTRQDEPALFVALTFERREVLDSSNIKPMNLIGVDRGENIPAVIALTDPEGCPLSRFKDSLGNPTHILRIGESYKEKQRTIQAKKEVEQRRAGGYSRKYASKAKNLADDMVRNTARDLLYYAVTQDAMLIFENLSRGFGRQGKRTFSAERQYTRMEDWLTAKLAYEGLPSKTYLSKTLAQYTSKTCSNCGFTITSADYDRVLEKLKKTATGWMTTINGKELKVEGQITYYNRYKRQNVVKDLSVELDRLSEESVNNDISSWTKGRSGEALSLLKKRFSHRPVQEKFVCLNCGFETHADEQAALNIARSWLFLRSQEYKKYQTNKTTGNTDKRAFVETWQSFYRKKLKEVWKPAV

SEQ ID NO: 283 - protein, 978 aa, synthetic construct
QEIKRINKIRRRLVKDSNTKKAGKTGPMKTLLVRVMTPDLRERLENLRKKPENIPQPISNTSRANLNKLLTDYTEMKKAILHVYWEEFQKDPVGLMSRVAQPASKKIDQNKLKPEMDEKGNLTTAGFACSQCGQPLFVYKLEQVSEKGKAYTNYFGRCNVAEHEKLILLAQLKPEKDSDEAVTYSLGKFGQRALDFYSIHVTKESTHPVKPLAQIAGNRYASGPVGKALSDACMGTIASFLSKYQDIIIEHQKVVKGNQKRLESLRELAGKENLEYPSVTLPPQPHTKEGVDAYNEVIARVRMWVNLNLWQKLKLSRDDAKPLLRLKGFPSFPLVERQANEVDWWDMVCNVKKLINEKKEDGKVFWQNLAGYKRQEALRPYLSSEEDRKKGKKFARYQLGDLLLHLEKKHGEDWGKVYDEAWERIDKKVEGLSKHIKLEEERRSEDAQSKAALTDWLRAKASFVIEGLKEADKDEFCRCELKLQKWYGDLRGKPFAIEAENSILDISGFSKQYNCAFIWQKDGVKKLNLYLIINYFKGGKLRFKKIKPEAFEANRFYTVINKKSGEIVPMEVNFNFDDPNLIILPLAFGKRQGREFIWNDLLSLETGSLKLANGRVIEKTLYNRRTRQDEPALFVALTFERREVLDSSNIKPMNLIGVDRGENIPAVIALTDPEGCPLSRFKDSLGNPTHILRIGESYKEKQRTIQAKKEVEQRRAGGYSRKYASKAKNLADDMVRNTARDLLYYAVTQDAMLIFENLSRGFGRQGKRTFAAERQYTRMEDWLTAKLAYEGLPSKTYLSKTLAQYTSKTCSNCGFTITSADYDRVLEKLKKTATGWMTTINGKELKVEGQITYYNRYKRQNVVKDLSVELDRLSEESVNNDISSWTKGRSGEALSLLKKRFSHRPVQEKFVCLNCGFETHADEQAALNIARSWLFLRSQEYKKYQTNKTTGNTDKRAFVETWQSFYRKKLKEVWKPAV

SEQ ID NO: 284 - protein, 978 aa, synthetic construct
QEIKRINKIRRRLVKDSNTKKAGKTGPMKTLLVRVMTPDLRERLENLRKKPENIPQPISNTSRANLNKLLTDYTEMKKAILHVYWEEFQKDPVGLMSRVAQPASKKIDQNKLKPEMDEKGNLTTAGFACSQCGQPLFVYKLEQVSEKGKAYTNYFGRCNVAEHEKLILLAQLKPEKDSDEAVTYSLGKFGQRALDFYSIHVTKESTHPVKPLAQIAGNRYASGPVGKALSDACMGTIASFLSKYQDIIIEHQKVVKGNQKRLESLRELAGKENLEYPSVTLPPQPHTKEGVDAYNEVIARVRMWVNLNLWQKLKLSRDDAKPLLRLKGFPSFPLVERQANEVDWWDMVCNVKKLINEKKEDGKVFWQNLAGYKRQEALRPYLSSEEDRKKGKKFARYQLGDLLLHLEKKHGEDWGKVYDEAWERIDKKVEGLSKHIKLEEERRSEDAQSKAALTDWLRAKASFVIEGLKEADKDEFCRCELKLQKWYGDLRGKPFAIEAENSILDISGFSKQYNCAFIWQKDGVKKLNLYLIINYFKGGKLRFKKIKPEAFEANRFYTVINKKSGEIVPMEVNFNFDDPNLIILPLAFGKRQGREFIWNDLLSLETGSLKLANGRVIEKTLYNRRTRQDEPALFVALTFERREVLDSSNIKPMNLIGVDRGENIPAVIALTDPEGCPLSRFKDSLGNPTHILRIGESYKEKQRTIQAKKEVEQRRAGGYSRKYASKAKNLADDMVRNTARDLLYYAVTQDAMLIFENLSRGFGRQGKRTFMAERQYTRMEDWLTAKLAYEGLPSKTYLSKTLAQYTSKTCSNCGFTITSADYDRVLEKLKKTATGWMTTINGKELKVEGQITYYNRYKRQNVVKDLSVELDRLSEESVNNDISSWDKGRSGEALSLLKKRFSHRPVQEKFVCLNCGFETHADEQAALNIARSWLFLRSQEYKKYQTNKTTGNTDKRAFVETWQSFYRKKLKEVWKPAV

SEQ ID NO: 285 - protein, 979 aa, synthetic construct
QEIKRINKIRRRLVKDSNTKKAGKTGPMKTLLVRVMTPDLRERLENLRKKPENIPQPISNTSRANLNKLLTDYTEMKKAILHVYWEEFQKDPVGLMSRVAQPASKKIDQNKLKPEMDEKGNLTTAGFACSQCGQPLFVYKLEQVSEKGKAYTNYFGRCNVAEHEKLILLAQLKPEKDSDEAVTYSLGKFGQRALDFYSIHVTKESTHPVKPLAQIAGNRYASGPVGKALSDACMGTIASFLSKYQDIIIEHQKVVKGNQKRLESLRELAGKENLEYPSVTLPPQPHTKEGVDAYNEVIARVRMWVNLNLWQKLKLSRDDAKPLLRLKGFPSFPLVERQANEVDWWDMVCNVKKLINEKKEDGKVFWQNLAGYKRQEALRPYLSSEEDRKKGKKFARYQLGDLLLHLEKKHGEDWGKVYDEAWERIDKKVEGLSKHIKLEEERRSEDAQSKAALTDWLRAKASFVIEGLKEADKDEFCRCELKLQKWYGDLRGKPFAIEAENSILDISGFSKQYNCAFIWQKDGVKKLNLYLIINYFKGGKLRFKKIKPEAFEANRFYTVINKKSGEIVPMEVNFNFDDPNLIILPLAFGKRQGREFIWNDLLSLETGSLKLANGRVIEKTLYNRRTRQDEPALFVALTFERREVLDSSNIKPMNLIGVDRGENIPAVIALTDPEGCPLSRFKDSLGNPTHILRIGESYKEKQRTIQAKKEVEQRRAGGYSRKYASKAKNLADDMVRNTARDLLYYAVTQDAMLIFENLSRGFGRQGKRTFMAERQYTRMEDWLTAKLAYEGLPSKTYLSKTLAQYTSKTCSNCGFTITSADYDRVLEKLKKTATGWMTTINGKELKVEGQITYYNRYKRQNVVKDLSVELDRLSEESVNNDISSWTKGRSGNEALSLLKKRFSHRPVQEKFVCLNCGFETHADEQAALNIARSWLFLRSQEYKKYQTNKTTGNTDKRAFVETWQSFYRKKLKEVWKPAV

SEQ ID NO: 286 - protein, 978 aa, synthetic construct
QEIKRINKIRRRLVKDSNTKKAGKTGPMKTLLVRVMTPDLRERLENLRKKPENIPQPISNTSRANLNKLLTDYTEMKKAILHVYWEEFQKDPVGLMSRVAQPASKKIDQNKLKPEMDEKGNLTTAGFACSQCGQPLFVYKLEQVSEKGKAYTNYFGRCNVAEHEKLILLAQLKPEKDSDEAVTYSLGKFGQRALDFYSIHVTKESTHPVKPLAQIAGNRYASGPVGKALSDACMGTIASFLSKYQDIIIEHQKVVKGNQKRLESLRELAGKENLEYPSVTLPPQPHTKEGVDAYNEVIARVRMWVNLNLWQKLKLSRDDAKPLLRLKGFPSFPLVERQANEVDWWDMVCNVKKLINEKKEDGKVFWQNLAGYKRQEALRPYLSSEEDRKKGKKFARYQLGDLLLHLEKKHGEDWGKVYDEAWERIDKKVEGLSKHIKLEEERRSEDAQSKAALTDWLRAKASFVIEGLKEADKDEFCRCELKLQKWYGDLRGKPFAIEAENSILDISGFSKQYNCAFIWQKDGVKKLNLYLIINYFKGGKLRFKKIKPEAFEANRFYTVINKKSGEIVPMEVNFNFDDPNLIILPLAFGKRQGREFIWNDLLSLETGSLKLANGRVIEKTLYNRRTRQDEPALFVALTFERREVLDSSNIKPMNLIGVDRGENIPAVIALTDPEGCPLSRFKDSLGNPTHILRIGESYKEKQRTIQAKKEVEQRRAGGYSRKYASKAKNLADDMVRNTARDLLYYAVTQDAMLIFENLSRGFGRQGKRTFMAERQYTRMEDWLTAKLAYEGLPSKTYLSKTLAQYTSKTCSNCGFTITSADYDRVLEKLKKTATGWMTTINGKELKVEGQITYYNRYKRQNVVKDLSVELDRLSEESVNNDISSWTKGRSGEALSLLKKRFSHRPVQEKFVCLNCGFETHADEQAALNIARVWLFLRSQEYKKYQTNKTTGNTDKRAFVETWQSFYRKKLKEVWKPAV

SEQ ID NO: 287 - protein, 978 aa, synthetic construct
QEIKRINKIRRRLVKDSNTKKAGKTGPMKTLLVRVMTPDLRERLENLRKKPENIPQPISNTSRANLNKLLTDYTEMKKAILHVYWEEFQKDPVGLMSRVAQPASKKIDQNKLKPEMDEKGNLTTAGFACSQCGQPLFVYKLEQVSEKGKAYTNYFGRCNVAEHEKLILLAQLKPEKDSDEAVTYSLGKFGQRALDFYSIHVTKESTHPVKPLAQIAGNRYASGPVGKALSDACMGTIASFLSKYQDIIIEHQKVVKGNQKRLESLRELAGKENLEYPSVTLPPQPHTKEGVDAYNEVIARVRMWVNLNLWQKLKLSRDDAKPLLRLKGFPSFPLVERQANEVDWWDMVCNVKKLINEKKEDGKVFWQNLAGYKRQEALRPYLSSEEDRKKGKKFARYQLGDLLLHLEKKHGEDWGKVYDEAWERIDKKVEGLSKHIKLEEERRSEDAQSKAALTDWLRAKASFVIEGLKEADKDEFCRCELKLQKWYGDLRGKPFAIEAENSILDISGFSKQYNCAFIWQKDGVKKLNLYLIINYFKGGKLRFKKIKPEAFEANRFYTVINKKSGEIVPMEVNFNFDDPNLIILPLAFGKRQGREFIWNDLLSLETGSLKLANGRVIEKTLYNRRTRQDEPALFVALTFERREVLDSSNIKPMNLIGVDRGENIPAVIALTDPEGCPLSRFKDSLGNPTHILRIGESYKEKQRTIQAKKEVEQRRAGGYSRKYASKAKNLADDMVRNTARDLLYYAVTQDAMLIFENLSRGFGRQGKRTFMAERQYTRMEDWLTAKLAYEGLPSKTYLSKTLAQYTSKTCSNCGFTITSADYDRVLEKLKKTATGWMTTINGKELKVEGQITYYNRYKRQNVVKDLSVELDRLSEESVNNDISSWTKGRSGEALSLLKKRFSHRPVQEKFVCLNCGFETHADEQAALNIARSWLFLRSQEYKKYQTNKTTINTDKRAFVETWQSFYRKKLKEVWKPAV

SEQ ID NO: 288 - protein, 977 aa, synthetic construct
QEIKRINKIRRRLVKDSNTKKAGKTGPMKTLLVRVMTPDLRERLENLRKKPENIPQPISNTSRANLNKLLTDYTEMKKAILHVYWEEFQKDPVGLMSRVAQPASKKIDQNKLKPEMDEKGNLTTAGFACSQCGQPLFVYKLEQVSEKGKAYTNYFGRCNVAEHEKLILLAQLKPEKDSDEAVTYSLGKFGQRALDFYSIHVTKESTHPVKPLAQIAGNRYASGPVGKALSDACMGTIASFLSKYQDIIIEHQKVVKGNQKRLESLRELAGKENLEYPSVTLPPQPHTKEGVDAYNEVIARVRMWVNLNLWQKLKLSRDDAKPLLRLKGFPSFPLVERQANEVDWWDMVCNVKKLINEKKEDGKVFWQNLAGYKRQEALRPYLSSPEDRKKGKKFARYQFGDLLLHLEKKHGEDWGKVYDEAWERIDKKVEGLSKHIKLEEERRSEDAQSKAALTDWLRAKASFVIEGLKEADKDEFCRCELKLQKWYGDLRGKPFAIEAENSILDISGFSKQYNCAFIWQKDGVKKLNLYLIINYFKGGKLRFKKIKPEAFEANRFYTVINKKSGEIVPMEVNFNFDDPNLIILPLAFGKRQGREFIWNDLLSLETGSLKLANGRVIEKTLYNRRTRQDEPALFVALTFERREVLDSSNIKPMNLIGVDRGENIPAVIALTDPEGCPLSRFKDSLGNPTHILRIGESYKEKQRTIQAKKEVEQRRAGGYSRKYASKAKNLANDMVRNTARDLLYYAVTQDAMLIFENLSRGFGRQGKRTFMAERQYTRMEDWLTAKLAYEGLSKTYLSKTLAQYTSKTCSNCGFTITSADYDRVLEKLKKTATGWMTTINGKELKVEGQITYYNRRKRQNVVKDLSVELDRLSEESVNNDISSWTKGRSGEALSLLKKRFSHRPVQEKFVCLNCGFETHADEQAALNIARSWLFLRSQEYKKYQTNKTTGNTDKRAFVETWQSFYRKKLKEVWKPAV

SEQ ID NO: 289 - protein, 977 aa, synthetic construct
QEIKRINKIRRRLVKDSNTKKAGKTGPMKTLLVRVMTPDLRERLENLRKKPENIPQPISNTSRANLNKLLTDYTEMKKAILHVYWEEFQKDPVGLMSRVAQPASKKIDQNKLKPEMDEKGNLTTAGFACSQCGQPLFVYKLEQVSEKGKAYTNYFGRCNVAEHEKLILLAQLKPEKDSDEAVTYSLGKFGQRALDFYSIHVTKESTHPVKPLAQIAGNRYASGPVGKALSDACMGTIASFLSKYQDIIIEHQKVVKGNQKRLESLRELAGKENLEYPSVTLPPQPHTKEGVDAYNEVIARVRMWVNLNLWQKLKLSRDDAKPLLRLKGFPSFPLVERQANEVDWWDMVCNVKKLINEKKEDGKVFWQNLAGYKRQEALRPYLSSEEDRKKGKKFARYQLGDLLLHLEKKHGEDWGKVYDEAWERIDKKVEGLSKHIKLEEERRSEDAQSKAALTDWLRAKASFVIEGLKEADKDEFSRCELKLQKWYGDLRGKPFAIEAENSILDISGFSKQYNCAFIWQKDGVKKLNLYLIINYFKGGKLRFKKIKPEAFEANRFYTVINKKSGEIVPMEVNFNFDDPNLIILPLAFGKRQGREFIWNDLLSLETGSLKLANGRVIEKTLYNRRTRQDEPALFVALTFERREVLDSSNIKPMNLIGVDRGENIPAVIALTDPEGCPLSRFKDSLGNPTHILRIGESYKEKQRTIQAKKEVEQRRAGGYSRKYASKAKNLADDMVRNTARDLLYYAVTQDAMLIFENLSRGFGRQGKRTFMAERQYTRMEDWLTAKLAYEGLSKTYLSKTLAQYTSKTCSNCGFTITSADYDRVLEKLKKTATGWMTTINGKELKVEGQITYYNRRKRQNVVKDLSVELDRLSEESVNNDISSWTKGRSGEALSLLKKRFSHRPVQEKFVCLNCGFETHADEQAALNIARSWLFLRSQEYKKYQTNKTTGNTDKRAFVETWQSFYRKKLKEVWKPAV

SEQ ID NO: 290 - protein, 977 aa, synthetic construct
QEIKRINKIRRRLVKDSNTKKAGKTGPMKTLLVRVMTPDLRERLENLRKKPENIPQPISNTSRANLNKLLTDYTEMKKAILHVYWEEFQKDPVGLMSRVAQPASKKIDQNKLKPEMDEKGNLTTAGFACSQCGQPLFVYKLEQVSEKGKAYTNYFGRCNVAEHEKLILLAQLKPEKDSDEAVTYSLGKFGQRALDFYSIHVTKESTHPVKPLAQIAGNRYASGPVGKALSDACMGTIASFLSKYQDIIIEHQKVVKGNQKRLESLRELAGKENLEYPSVTLPPQPHTKEGVDAYNEVIARVRMWVNLNLWQKLKLSRDDAKPLLRLKGFPSFPLVERQANEVDWWDMVCNVKKLINEKKEDGKVFWQNLAGYKRQEALRPYLSSENDRKKGKKFARYQFGDLLKHLEKKHGEDWGKVYDEAWERIDKKVEGLSKHIKLEEERRSEDAQSKAALTDWLRAKASFVIEGLKEADKDEFSRCELKLQKWYGDLRGKPFAIEAENSILDISGFSKQYNCAFIWQKDGVKKLNLYLIINYFKGGKLRFKKIKPEAFEANRFYTVINKKSGEIVPMEVNFNFDDPNLIILPLAFGKRQGREFIWNDLLSLETGSLKLANGRVIEKTLYNRRTRQDEPALFVALTFERREVLDSSNIKPMNLIGVDRGENIPAVIALTDPEGCPLSRFKDSLGNPTHILRIGESYKEKQRTIQAKKEVEQRRAGGYSRKYASKAKNLADDMVRNTARDLLYYAVTQDAMLIFENLSRGFGRQGKRTFMAERQYTRMEDWLTAKLAYEGLSKTLLSKTLAQYTSKTCSNCGFTITSADYDRVLEKLKKTATGWMTTINGKELKVEGQITYYNRRKRQNVVKDLSVELDRLSEESVNNDISSWTKGRSGEALSLLKKRFSHRPVQEKFVCLNCGFETHADEQAALNIARSWLFLRSQEYKKYQTNKTTGNTDKRAFVETWQSFYRKKLKEVWKPAV

SEQ ID NO: 291 - protein, 977 aa, synthetic construct
QEIKRINKIRRRLVKDSNTKKAGKTGPMKTLLVRVMTPDLRERLENLRKKPENIPQPISNTSRANLNKLLTDYTEMKKAILHVYWEEFQKDPVGLMSRVAQPASKKIDQNKLKPEMDEKGNLTTAGFACSQCGQPLFVYKLEQVSEKGKAYTNYFGRCNVAEHEKLILLAQLKPEKDSDEAVTYSLGKFGQRALDFYSIHVTKESTHPVKPLAQIAGNRYASGPVGKALSDACMGTIASFLSKYQDIIIEHQKVVKGNQKRLESLRELAGKENLEYPSVTLPPQPHTKEGVDAYNEVIARVRMWVNLNLWQKLKLSRDDAKPLLRLKGFPSFPLVERQANEVDWWDMVCNVKKLINEKKEDGKVFWQNLAGYKRQEALRPYLSSPEDRKKGKKFARYQLGDLLLHLEKKHGEDWGKVYDEAWERIDKKVEGLSKHIKLEEERRSEDAQSKAALTDWLRAKASFVIEGLKEADKDEFCRCELKLQKWYGDLRGKPFAIEAENSILDISGFSKQYNCAFIWQKDGVKKLNLYLIINYFKGGKLRFKKIKPEAFEANRFYTVINKKSGEIVPMEVNFNFDDPNLIILPLAFGKRQGREFIWNDLLSLETGSLKLANGRVIEKTLYNRRTRQDEPALFVALTFERREVLDSSNIKPMNLIGVDRGENIPAVIALTDPEGCPLSRFKDSLGNPTHILRIGESYKEKQRTIQAKKEVEQRRAGGYSRKYASKAKNLANDMVRNTARDLLYYAVTQDAMLIFENLSRGFGRQGKRTFMAERQYTRMEDWLTAKLAYEGLSKTYLSKTLAQYTSKTCSNCGFTITSADYDRVLEKLKKTATGWMTTINGKELKVEGQITYYNRRKRQNVVKDLSVELDRLSEESVNNDISSWTKGRSGEALSLLKKRFSHRPVQEKFVCLNCGFETHADEQAALNIARSWLFLRSQEYKKYQTNKTTGNTDKRAFVETWQSFYRKKLKEVWKPAV

SEQ ID NO: 292 - protein, 977 aa, synthetic construct
QEIKRINKIRRRLVKDSNTKKAGKTGPMKTLLVRVMTPDLRERLENLRKKPENIPQPISNTSRANLNKLLTDYTEMKKAILHVYWEEFQKDPVGLMSRVAQPASKKIDQNKLKPEMDEKGNLTTAGFACSQCGQPLFVYKLEQVSEKGKAYTNYFGRCNVAEHEKLILLAQLKPEKDSDEAVTYSLGKFGQRALDFYSIHVTKESTHPVKPLAQIAGNRYASGPVGKALSDACMGTIASFLSKYQDIIIEHQKVVKGNQKRLESLRELAGKENLEYPSVTLPPQPHTKEGVDAYNEVIARVRMWVNLNLWQKLKLSRDDAKPLLRLKGFPSFPLVERQANEVDWWDMVCNVKKLINEKKEDGKVFWQNLAGYKRQEALRPYLSSPEDRKKGKKFARYQLGDLLLHLEKKHGEDWGKVYDEAWERIDKKVEGLSKHIKLEEERRSEDAQSKAALTDWLRAKASFVIEGLKEADKDEFCRCELKLQKWYGDLRGKPFAIEAENSILDISGFSKQYNCAFIWQKDGVKKLNLYLIINYFKGGKLRFKKIKPEAFEANRFYTVINKKSGEIVPMEVNFNFDDPNLIILPLAFGKRQGREFIWNDLLSLETGSLKLANGRVIEKPLYNRRTRQDEPALFVALTFERREVLDSSNIKPMNLIGVDRGENIPAVIALTDPEGCPLSRFKDSLGNPTHILRIGESYKEKQRTIQAKKEVEQRRAGGYSRKYASKAKNLADDMVRNTARDLLYYAVTQDAMLIFENLSRGFGRQGKRTFMAERQYTRMEDWLTAKLAYEGLSKTYLSKTLAQYTSKTCSNCGFTITSADYDRVLEKLKKTATGWMTTINGKELKVEGQITYYNRRKRQNVVKDLSVELDRLSEESVNNDISSWTKGRSGEALSLLKKRFSHRPVQEKFVCLNCGFETHADEQAALNIARSWLFLRSQEYKKYQTNKTTGNTDKRAFVETWQSFYRKKLKEVWKPAV

SEQ ID NO: 293 - protein, 978 aa, synthetic construct
QEIKRINKIRRRLVKDSNTKKAGKTGPMKTLLVRVMTPDLRERLENLRKKPENIPQPISNTSRANLNKLLTDYTEMKKAILHVYWEEFQKDPVGLMSRVAQPASKKIDQNKLKPEMDEKGNLTTAGFACSQCGQPLFVYKLEQVSEKGKAYTNYFGRCNVAEHEKLILLAQLKPEKDSDEAVTYSLGKFGQRALDFYSIHVTKESTHPVKPLAQIAGNRYASGPVGKALSDACMGTIASFLSKYQDIIIEHQKVVKGNQKRLESLRELAGKENLEYPSVTLPPQPHTKEGVDAYNEVIARVRMWVNLNLWQKLKLSRDDAKPLLRLKGFPSFPLVERQANEVDWWDMVCNVKKLINEKKEDGKVFWQNLAGYKRQEALRPYLSSEEDRKKGKKFARYQLGDLLLHLEKKHGEDWGKVYDEAWERIDKKVEGLSKHIKLEEERRSEDAQSKAALTDWLRAKASFVIEGLKEADKDEFCRCELKLQKWYGDLRGKPFAIEAENSILDISGFSKQYNCAFIWQKDGVKKLNLYLIINYFKGGKLRFKKIKPEAFEANRFYTVINKKSGEIVPMEVNFNFDDPNLIILPLAFGKRQGREFIWNDLLSLETGSLKLANGRVIEKTLYNRRTRQDEPALFVALTFEDREVLDSSNIKPMNLIGVDRGENIPAVIALTDPEGCPLSRFKDSLGNPTHILRIGESYKEKQRTIQAKKEVEQRRAGGYSRKYASKAKNLADDMVRNTARDLLYYAVTQDAMLIFENLSRGFGRQGKRTFMAERQYTRMEDWLTAKLAYEGLPSKTYLSKTLAQYTSKTCSNCGFTITSADYDRVLEKLKKTATGWMTTINGKELKVEGQITYYNRYKRQNVVKDLSVELDRLSEESVNNDISSWTKGRSGEALSLLKKRFSHRPVQEKFVCLNCGFETHADEQAALNIARSWLFLRSQEYKKYQTNKTTGNTDKRAFVETWQSFYRKKLKEVWKPAV

SEQ ID NO: 294 - protein, 979 aa, synthetic construct
QEIKRINKIRRRLVKDSNTKKAGKTGPMKTLLVRVMTPDLRERLENLRKKPENIPQPISNTSRANLNKLLTDYTEMKKAILHVYWEEFQKDPVGLMSRVAQPASKKIDQNKLKPEMDEKGNLTTAGFACSQCGQPLFVYKLEQVSEKGKAYTNYFGRCNVAEHEKLILLAQLKPEKDSDEAVTYSLGKFGQRALDFYSIHVTKESTHPVKPLAQIAGNRYASGPVGKALSDACMGTIASFLSKYQDIIIEHQKVVKGNQKRLESLRELAGKENLEYPSVTLPPQPHTKEGVDAYNEVIARVRMWVNLNLWQKLKLSRDDAKPLLRLKGFPSFPLVERQANEVDWWDMVCNVKKLINEKKEDGKVFWQNLAGYKRQEALRPYLSSEEDRKKGKKFARYQLGDLLLHLEKKHGEDWGKVYDEAWERIDKKVEGLSKHIKLEEERRSEDAQSKAALTDWLRAKASFVIEGLKEADKDEFCRCELKLQKWYGDLRGKHPFAIEAENSILDISGFSKQYNCAFIWQKDGVKKLNLYLIINYFKGGKLRFKKIKPEAFEANRFYTVINKKSGEIVPMEVNFNFDDPNLIILPLAFGKRQGREFIWNDLLSLETGSLKLANGRVIEKTLYNRRTRQDEPALFVALTFERREVLDSSNIKPMNLIGVDRGENIPAVIALTDPEGCPLSRFKDSLGNPTHILRIGESYKEKQRTIQAKKEVEQRRAGGYSRKYASKAKNLADDMVRNTARDLLYYAVTQDAMLIFENLSRGFGRQGKRTFMAERQYTRMEDWLTAKLAYEGLPSKTYLSKTLAQYTSKTCSNCGFTITSADYDRVLEKLKKTATGWMTTINGKELKVEGQITYYNRYKRQNVVKDLSVELDRLSEESVNNDISSWTKGRSGEALSLLKKRFSHRPVQEKFVCLNCGFETHADEQAALNIARSWLFLRSQEYKKYQTNKTTGNTDKRAFVETWQSFYRKKLKEVWKPAV

SEQ ID NO: 295 - protein, 979 aa, synthetic construct
QEIKRINKIRRRLVKDSNTKKAGKTGPMKTLLVRVMTPDLRERLENLRKKPENIPQPISNTSRANLNKLLTDYTEMKKAILHVYWEEFQKDPVGLMSRVAQPASKKIDQNKLKPEMDEKGNLTTAGFACSQCGQPLFVYKLEQVSEKGKAYTNYFGRCNVAEHEKLILLAQLKPEKDSDEAVTYSLGKFGQRALDFYSIHVTKESTHPVKPLAQIAGNRYASGPVGKALSDACMGTIASFLSKYQDIIIEHQKVVKGNQKRLESLRELAGKENLEYPSVTLPPQPHTKEGVDAYNEVIARVRMWVNLNLWQKLKLSRDDAKPLLRLKGFPSFPLVERQANEVDWWDMVCNVKKLIINEKKEDGKVFWQNLAGYKRQEALRPYLSSEEDRKKGKKFARYQLGDLLLHLEKKHGEDWGKVYDEAWERIDKKVEGLSKHIKLEEERRSEDAQSKAALTDWLRAKASFVIEGLKEADKDEFCRCELKLQKWYGDLRGKPFAIEAENSILDISGFSKQYNCAFIWQKDGVKKLNLYLIINYFKGGKLRFKKIKPEAFEANRFYTVINKKSGEIVPMEVNFNFDDPNLIILPLAFGKRQGREFIWNDLLSLETGSLKLANGRVIEKTLYNRRTRQDEPALFVALTFERREVLDSSNIKPMNLIGVDRGENIPAVIALTDPEGCPLSRFKDSLGNPTHILRIGESYKEKQRTIQAKKEVEQRRAGGYSRKYASKAKNLADDMVRNTARDLLYYAVTQDAMLIFENLSRGFGRQGKRTFMAERQYTRMEDWLTAKLAYEGLPSKTYLSKTLAQYTSKTCSNCGFTITSADYDRVLEKLKKTATGWMTTINGKELKVEGQITYYNRYKRQNVVKDLSVELDRLSEESVNNDISSWTKGRSGEALSLLKKRFSHRPVQEKFVCLNCGFETHADEQAALNIARSWLFLRSQEYKKYQTNKTTGNTDKRAFVETWQSFYRKKLKEVWKPAV

SEQ ID NO: 296 - protein, 979 aa, synthetic construct
QEIKRINKIRRRLVKDSNTKKAGKTRGPMKTLLVRVMTPDLRERLENLRKKPENIPQPISNTSRANLNKLLTDYTEMKKAILHVYWEEFQKDPVGLMSRVAQPASKKIDQNKLKPEMDEKGNLTTAGFACSQCGQPLFVYKLEQVSEKGKAYTNYFGRCNVAEHEKLILLAQLKPEKDSDEAVTYSLGKFGQRALDFYSIHVTKESTHPVKPLAQIAGNRYASSPVGKALSDACMGTIASFLSKYQDIIIEHQKVVKGNQKRLESLRELAGKENLEYPSVTLPPQPHTKEGVDAYNEVIARVRMWVNLNLWQKLKLSRDDAKPLLRLKGFPSFPLVERQANEVDWWDMVCNVKKLINEKKEDGKVFWQNLAGYKRQEALRPYLSSEEDRKKGKKFARYQLGDLLLHLEKKHGEDWGKVYDEAWERIDKKVEGLSKHIKLEEERRSEDAQSKAALTDWLRAKASFVIEGLKEADKDEFCRCELKLQKWYGDLRGKPFAIEAENSILDISGFSKQYNCAFIWQKDGVKKLNLYLIINYFKGGKLRFKKIKPEAFEANRFYTVINKKSGEIVPMEVNFNFDDPNLIILPLAFGKRQGREFIWNDLLSLETGSLKLANGRVIEKTLYNRRTRQDEPALFVALTFERREVLDSSNIKPMNLIGVDRGENIPAVIALTDPEGCPLSRFKDSLGNPTHILRIGESYKEKQRTIQAKKEVEQRRAGGYSRKYASKAKNLADDMVRNTARDLLYYAVTQDAMLIFENLSRGFGRQGKRTFMAERQYTRMEDWLTAKLAYEGLPSKTYLSKTLAQYTSKTCSNCGFTITSADYDRVLEKLKKTATGWMTTINGKELKVEGQITYYNRYKRQNVVKDLSVELDRLSEESVNNDISSWTKGRSGEALSLLKKRFSHRPVQEKFVCLNCGFETHADEQAALNIARSWLFLRSQEYKKYQTNKTTGNTDKRAFVETWQSFYRKKLKEVWKPAV

SEQ ID NO: 297 - protein, 979 aa, synthetic construct
QEIKRINKIRRRLVKDSNTKKAGKTRGPMKTLLVRVMTPDLRERLENLRKKPENIPQPISNTSRANLNKLLTDYTEMKKAILHVYWEEFQKDPVGLMSRVAQPASKKIDQNKLKPEMDEKGNLTTAGFACSQCGQPLFVYKLEQVSEKGKAYTNYFGRCNVAEHEKLILLAQLKPEKDSDEAVTYSLGKFGQRALDFYSIHVTKESTHPVKPLAQIAGNRYASGPVGKALSGACMGTIASFLSKYQDIIIEHQKVVKGNQKRLESLRELAGKENLEYPSVTLPPQPHTKEGVDAYNEVIARVRMWVNLNLWQKLKLSRDDAKPLLRLKGFPSFPLVERQANEVDWWDMVCNVKKLINEKKEDGKVFWQNLAGYKRQEALRPYLSSEEDRKKGKKFARYQLGDLLLHLEKKHGEDWGKVYDEAWERIDKKVEGLSKHIKLEEERRSEDAQSKAALTDWLRAKASFVIEGLKEADKDEFCRCELKLQKWYGDLRGKPFAIEAENSILDISGFSKQYNCAFIWQKDGVKKLNLYLIINYFKGGKLRFKKIKPEAFEANRFYTVINKKSGEIVPMEVNFNFDDPNLIILPLAFGKRQGREFIWNDLLSLETGSLKLANGRVIEKTLYNRRTRQDEPALFVALTFERREVLDSSNIKPMNLIGVDRGENIPAVIALTDPEGCPLSRFKDSLGNPTHILRIGESYKEKQRTIQAKKEVEQRRAGGYSRKYASKAKNLADDMVRNTARDLLYYAVTQDAMLIFENLSRGFGRQGKRTFMAERQYTRMEDWLTAKLAYEGLPSKTYLSKTLAQYTSKTCSNCGFTITSADYDRVLEKLKKTATGWMTTINGKELKVEGQITYYNRYKRQNVVKDLSVELDRLSEESVNNDISSWTKGRSGEALSLLKKRFSHRPVQEKFVCLNCGFETHADEQAALNIARSWLFLRSQEYKKYQTNKTTGNTDKRAFVETWQSFYRKKLKEVWKPAV

SEQ ID NO: 298 - protein, 978 aa, synthetic construct
QEIKRINKIRRRLVKDSNTKKAGKTGPMKTLLVRVMTPDLRERLENLRKKPENIPQPISNTSRANLNKLLTDYTEMKKAILHVYWEEFQKDPVGLMSRVAQPASKKIDQNKLKPEMDEKGNLTTAGFACSQCGQPLFVYKLEQVSEKGKAYTNYFGRCNVAEHEKLILLAQLKPEKDSDEAVTYSLGKFGQRALDFYSIHVTKESTHPVKPLAQIAGNRYASGPVGKALSDACMGTIASFLSKYQDIIIEHQKVVKGNQKRLESLRELAGKENLEYPSVTLPPQPHTKEGVDAYNEVIARVRMWVNLNLWQKLKLSRDDAKPLLRLKGFPSFPLVERQANEVDWWDMVCNVKKLINEKKEDGKVFWQNLAGYKRQEALRPYLSSPEDRKKGKKFARYQFGDLLLHLEKKHGEDWGKVYDEAWERIDKKVEGLSKHIKLEEERRSEDAQSKAALTDWLRAKASFVIEGLKEADKDEFCRCELKLQKWYGDLRGKPFAIEAENSILDISGFSKQYNCAFIWQKDGVKKLNLYLIINYFKGGKLRFKKIKPEAFEANRFYTVINKKSGEIVPMEVNFNFDDPNLIILPLAFGKRQGREFIWNDLLSLETGSLKLANGRVIEKTLYNRRTRQDEPALFVALTFERREVLDSSNIKPMNLIGVDRGENIPAVIALTDPEGCPLSRFKDSLGNPTHILRIGESYKEKQRTIQAKKEVEQRRAGGYSRKYASKAKNLANDMVRNTARDLLYYAVTQDAMLIFENLSRGFGRQGKRTFMAERQYTRMEDWLTAKLAYEGLPSKTYLSKTLAQYTSKTCSNCGFTITSADYDRVLEKLKKTATGWMTTINGKELKVEGQITYYNRRKRQNVVKDLSVELDRLSEESVNNDISSWTKGRSGEALSLLKKRFSHRPVQEKFVCLNCGFETHADEQAALNIARSWLFLRSQEYKKYQTNKTTGNTDKRAFVETWQSFYRKKLKEVWKPAV

SEQ ID NO: 299 - protein, 978 aa, synthetic construct
QEIKRINKIRRRLVKDSNTKKAGKTGPMKTLLVRVMTPDLRERLENLRKKPENIPQPISNTSRANLNKLLTDYTEMKKAILHVYWEEFQKDPVGLMSRVAQPASKKIDQNKLKPEMDEKGNLTTAGFACSQCGQPLFVYKLEQVSEKGKAYTNYFGRCNVAEHEKLIKLAQLKPEKDSDEAVTYSLGKFGQRALDFYSIHVTKESTHPVKPLAQIAGNRYASSPVGKALSDACMGTIASFLSKYQDIIIEHQKVVKGNQKRLESLRELAGKENLEYPSVTLPPQPHTKEGVDAYNEVIARVRMWVNLNLWQKLKLSRDDAKPLLRLKGFPSFPLVERQANEVDWWDMVCNVKKLINEKKEDGKVFWQNLAGYKRQEALRPYLSSEEDRKKGKKFARYQLGDLLLHLEKKHGEDWGKVYDEAWERIDKKVEGLSKHIKLEEERRSEDAQSKAALTDWLRAKASFVIEGLKEADKDEFCRCELKLQKWYGDLRGKPFAIEAENSILDISGFSKQYNCAFIWQKDGVKKLNLYLIINYFKGGKLRFKKIKPEAFEANRFYTVINKKSGEIVPMEVNFNFDDPNLIILPLAFGKRQGREFIWNDLLSLETGSLKLANGRVIEKTLYNRRTRQDEPALFVALTFERREVLDSSNIKPMNLIGVDRGENIPAVIALTDPEGCPLSRFKDSLGNPTHILRIGESYKEKQRTIQAKKEVEQRRAGGYSRKYASKAKNLADDMVRNTARDLLYYAVTQDAMLIFENLSRGFGRQGKRTFMAERQYTRMEDWLTAKLAYEGLPSKTYLSKTLAQYTSKTCSNCGFTITSADYDRVLEKLKKTATGWMTTINGKELKVEGQITYYNRYKRQNVVKDLSVELDRLSEESVNNDISSWTKGRSGEALSLLKKRFSHRPVQEKFVCLNCGFETHADEQAALNIARSWLFLRSQEYKKYQTNKTTGNTDKRAFVETWQSFYRKKLKEVWKPAV

SEQ ID NO: 300 - protein, 978 aa, synthetic construct
QEIKRINKIRRRLVKDSNTKKAGKTGPMKTLLVRVMTPDLRERLENLRKKPENIPQPISNTSRANLNKLLTDYTEMKKAILHVYWEEFQKDPVGLMSRVAQPASKKIDQNKLKPEMDEKGNLTTAGFACSQCGQPLFVYKLEQVSEKGKAYTNYFGRCNVAEHEKLILLAQLKPEKDSDEAVTYSLGKFGQRALDFYSIHVTKESTHPVKPLAQIAGNRYASSPVGKALSGACMGTIASFLSKYQDIIIEHQKVVKGNQKRLESLRELAGKENLEYPSVTLPPQPHTKEGVDAYNEVIARVRMWVNLNLWQKLKLSRDDAKPLLRLKGFPSFPLVERQANEVDWWDMVCNVKKLINEKKEDGKVFWQNLAGYKRQEALRPYLSSEEDRKKGKKFARYQLGDLLLHLEKKHGEDWGKVYDEAWERIDKKVEGLSKHIKLEEERRSEDAQSKAALTDWLRAKASFVIEGLKEADKDEFCRCELKLQKWYGDLRGKPFAIEAENSILDISGFSKQYNCAFIWQKDGVKKLNLYLIINYFKGGKLRFKKIKPEAFEANRFYTVINKKSGEIVPMEVNFNFDDPNLIILPLAFGKRQGREFIWNDLLSLETGSLKLANGRVIEKTLYNRRTRQDEPALFVALTFERREVLDSSNIKPMNLIGVDRGENIPAVIALTDPEGCPLSRFKDSLGNPTHILRIGESYKEKQRTIQAKKEVEQRRAGGYSRKYASKAKNLADDMVRNTARDLLYYAVTQDAMLIFENLSRGFGRQGKRTFMAERQYTRMEDWLTAKLAYEGLPSKTYLSKTLAQYTSKTCSNCGFTITSADYDRVLEKLKKTATGWMTTINGKELKVEGQITYYNRYKRQNVVKDLSVELDRLSEESVNNDISSWTKGRSGEALSLLKKRFSHRPVQEKFVCLNCGFETHADEQAALNIARSWLFLRSQEYKKYQTNKTTGNTDKRAFVETWQSFYRKKLKEVWKPAV

SEQ ID NO: 301 - protein, 978 aa, synthetic construct
QEIKRINKIRRRLVKDSNTKKAGKTGPMKTLLVRVMTPDLRERLENLRKKPENIPQPISNTSRANLNKLLTDYTEMKKAILHVYWEEFQKDPVGLMSRVAQPASKKIDQNKLKPEMDEKGNLTTAGFACSQCGQPLFVYKLEQVSEKGKAYTNYFGRCNVAEHEKLIKLAQLKPEKDSDEAVTYSLGKFGQRALDFYSIHVTKESTHPVKPLAQIAGNRYASSPVGKALSGACMGTIASFLSKYQDIIIEHQKVVKGNQKRLESLRELAGKENLEYPSVTLPPQPHTKEGVDAYNEVIARVRMWVNLNLWQKLKLSRDDAKPLLRLKGFPSFPLVERQANEVDWWDMVCNVKKLINEKKEDGKVFWQNLAGYKRQEALRPYLSSEEDRKKGKKFARYQLGDLLLHLEKKHGEDWGKVYDEAWERIDKKVEGLSKHIKLEEERRSEDAQSKAALTDWLRAKASFVIEGLKEADKDEFCRCELKLQKWYGDLRGKPFAIEAENSILDISGFSKQYNCAFIWQKDGVKKLNLYLIINYFKGGKLRFKKIKPEAFEANRFYTVINKKSGEIVPMEVNFNFDDPNLIILPLAFGKRQGREFIWNDLLSLETGSLKLANGRVIEKTLYNRRTRQDEPALFVALTFERREVLDSSNIKPMNLIGVDRGENIPAVIALTDPEGCPLSRFKDSLGNPTHILRIGESYKEKQRTIQAKKEVEQRRAGGYSRKYASKAKNLADDMVRNTARDLLYYAVTQDAMLIFENLSRGFGRQGKRTFMAERQYTRMEDWLTAKLAYEGLPSKTYLSKTLAQYTSKTCSNCGFTITSADYDRVLEKLKKTATGWMTTINGKELKVEGQITYYNRYKRQNVVKDLSVELDRLSEESVNNDISSWTKGRSGEALSLLKKRFSHRPVQEKFVCLNCGFETHADEQAALNIARSWLFLRSQEYKKYQTNKTTGNTDKRAFVETWQSFYRKKLKEVWKPAV

SEQ ID NO: 302 - protein, 979 aa, synthetic construct
QEIKRINKIRRRLVKDSNTKKAGKTRGPMKTLLVRVMTPDLRERLENLRKKPENIPQPISNTSRANLNKLLTDYTEMKKAILHVYWEEFQKDPVGLMSRVAQPASKKIDQNKLKPEMDEKGNLTTAGFACSQCGQPLFVYKLEQVSEKGKAYTNYFGRCNVAEHEKLIKLAQLKPEKDSDEAVTYSLGKFGQRALDFYSIHVTKESTHPVKPLAQIAGNRYASGPVGKALSDACMGTIASFLSKYQDIIIEHQKVVKGNQKRLESLRELAGKENLEYPSVTLPPQPHTKEGVDAYNEVIARVRMWVNLNLWQKLKLSRDDAKPLLRLKGFPSFPLVERQANEVDWWDMVCNVKKLINEKKEDGKVFWQNLAGYKRQEALRPYLSSEEDRKKGKKFARYQLGDLLLHLEKKHGEDWGKVYDEAWERIDKKVEGLSKHIKLEEERRSEDAQSKAALTDWLRAKASFVIEGLKEADKDEFCRCELKLQKWYGDLRGKPFAIEAENSILDISGFSKQYNCAFIWQKDGVKKLNLYLIINYFKGGKLRFKKIKPEAFEANRFYTVINKKSGEIVPMEVNFNFDDPNLIILPLAFGKRQGREFIWNDLLSLETGSLKLANGRVIEKTLYNRRTRQDEPALFVALTFERREVLDSSNIKPMNLIGVDRGENIPAVIALTDPEGCPLSRFKDSLGNPTHILRIGESYKEKQRTIQAKKEVEQRRAGGYSRKYASKAKNLADDMVRNTARDLLYYAVTQDAMLIFENLSRGFGRQGKRTFMAERQYTRMEDWLTAKLAYEGLPSKTYLSKTLAQYTSKTCSNCGFTITSADYDRVLEKLKKTATGWMTTINGKELKVEGQITYYNRYKRQNVVKDLSVELDRLSEESVNNDISSWTKGRSGEALSLLKKRFSHRPVQEKFVCLNCGFETHADEQAALNIARSWLFLRSQEYKKYQTNKTTGNTDKRAFVETWQSFYRKKLKEVWKPAV

SEQ ID NO: 303 - protein, 979 aa, synthetic construct
QEIKRINKIRRRLVKDSNTKKAGKTRGPMKTLLVRVMTPDLRERLENLRKKPENIPQPISNTSRANLNKLLTDYTEMKKAILHVYWEEFQKDPVGLMSRVAQPASKKIDQNKLKPEMDEKGNLTTAGFACSQCGQPLFVYKLEQVSEKGKAYTNYFGRCNVAEHEKLIKLAQLKPEKDSDEAVTYSLGKFGQRALDFYSIHVTKESTHPVKPLAQIAGNRYASSPVGKALSDACMGTIASFLSKYQDIIIEHQKVVKGNQKRLESLRELAGKENLEYPSVTLPPQPHTKEGVDAYNEVIARVRMWVNLNLWQKLKLSRDDAKPLLRLKGFPSFPLVERQANEVDWWDMVCNVKKLINEKKEDGKVFWQNLAGYKRQEALRPYLSSEEDRKKGKKFARYQLGDLLLHLEKKHGEDWGKVYDEAWERIDKKVEGLSKHIKLEEERRSEDAQSKAALTDWLRAKASFVIEGLKEADKDEFCRCELKLQKWYGDLRGKPFAIEAENSILDISGFSKQYNCAFIWQKDGVKKLNLYLIINYFKGGKLRFKKIKPEAFEANRFYTVINKKSGEIVPMEVNFNFDDPNLIILPLAFGKRQGREFIWNDLLSLETGSLKLANGRVIEKTLYNRRTRQDEPALFVALTFERREVLDSSNIKPMNLIGVDRGENIPAVIALTDPEGCPLSRFKDSLGNPTHILRIGESYKEKQRTIQAKKEVEQRRAGGYSRKYASKAKNLADDMVRNTARDLLYYAVTQDAMLIFENLSRGFGRQGKRTFMAERQYTRMEDWLTAKLAYEGLPSKTYLSKTLAQYTSKTCSNCGFTITSADYDRVLEKLKKTATGWMTTINGKELKVEGQITYYNRYKRQNVVKDLSVELDRLSEESVNNDISSWTKGRSGEALSLLKKRFSHRPVQEKFVCLNCGFETHADEQAALNIARSWLFLRSQEYKKYQTNKTTGNTDKRAFVETWQSFYRKKLKEVWKPAV

SEQ ID NO: 304 - protein, 979 aa, synthetic construct
QEIKRINKIRRRLVKDSNTKKAGKTRGPMKTLLVRVMTPDLRERLENLRKKPENIPQPISNTSRANLNKLLTDYTEMKKAILHVYWEEFQKDPVGLMSRVAQPASKKIDQNKLKPEMDEKGNLTTAGFACSQCGQPLFVYKLEQVSEKGKAYTNYFGRCNVAEHEKLIKLAQLKPEKDSDEAVTYSLGKFGQRALDFYSIHVTKESTHPVKPLAQIAGNRYASSPVGKALSGACMGTIASFLSKYQDIIIEHQKVVKGNQKRLESLRELAGKENLEYPSVTLPPQPHTKEGVDAYNEVIARVRMWVNLNLWQKLKLSRDDAKPLLRLKGFPSFPLVERQANEVDWWDMVCNVKKLINEKKEDGKVFWQNLAGYKRQEALRPYLSSEEDRKKGKKFARYQLGDLLLHLEKKHGEDWGKVYDEAWERIDKKVEGLSKHIKLEEERRSEDAQSKAALTDWLRAKASFVIEGLKEADKDEFCRCELKLQKWYGDLRGKPFAIEAENSILDISGFSKQYNCAFIWQKDGVKKLNLYLIINYFKGGKLRFKKIKPEAFEANRFYTVINKKSGEIVPMEVNFNFDDPNLIILPLAFGKRQGREFIWNDLLSLETGSLKLANGRVIEKTLYNRRTRQDEPALFVALTFERREVLDSSNIKPMNLIGVDRGENIPAVIALTDPEGCPLSRFKDSLGNPTHILRIGESYKEKQRTIQAKKEVEQRRAGGYSRKYASKAKNLADDMVRNTARDLLYYAVTQDAMLIFENLSRGFGRQGKRTFMAERQYTRMEDWLTAKLAYEGLPSKTYLSKTLAQYTSKTCSNCGFTITSADYDRVLEKLKKTATGWMTTINGKELKVEGQITYYNRYKRQNVVKDLSVELDRLSEESVNNDISSWTKGRSGEALSLLKKRFSHRPVQEKFVCLNCGFETHADEQAALNIARSWLFLRSQEYKKYQTNKTTGNTDKRAFVETWQSFYRKKLKEVWKPAV

SEQ ID NO: 305 - protein, 978 aa, synthetic construct
QEIKRINKIRRRLVKDSNTKKAGKTGPMKTLLVRVMTPDLRERLENLRKKPENIPQPISNTSRANLNKLLTDYTEMKKAILHVYWEEFQKDPVGLMSRVAQPASKKIDQNKLKPEMDEKGNLTTAGFACSQCGQPLFVYKLEQVSEKGKAYTNYFGRCNVAEHEKLILLAQLKPEKDSDEAVTYSLGKFGQRALDFYSIHVTKESTHPVKPLAQIAGNRYASYPVGKALSGACMGTIASFLSKYQDIIIEHQKVVKGNQKRLESLRELAGKENLEYPSVTLPPQPHTKEGVDAYNEVIARVRMWVNLNLWQKLKLSRDDAKPLLRLKGFPSFPLVERQANEVDWWDMVCNVKKLINEKKEDGKVFWQNLAGYKRQEALRPYLSSEEDRKKGKKFARYQLGDLLLHLEKKHGEDWGKVYDEAWERIDKKVEGLSKHIKLEEERRSEDAQSKAALTDWLRAKASFVIEGLKEADKDEFCRCELKLQKWYGDLRGKPFAIEAENSILDISGFSKQYNCAFIWQKDGVKKLNLYLIINYFKGGKLRFKKIKPEAFEANRFYTVINKKSGEIVPMEVNFNFDDPNLIILPLAFGKRQGREFIWNDLLSLETGSLKLANGRVIEKTLYNRRTRQDEPALFVALTFERREVLDSSNIKPMNLIGVDRGENIPAVIALTDPEGCPLSRFKDSLGNPTHILRIGESYKEKQRTIQAKKEVEQRRAGGYSRKYASKAKNLADDMVRNTARDLLYYAVTQDAMLIFENLSRGFGRQGKRTFMAERQYTRMEDWLTAKLAYEGLPSKTYLSKTLAQYTSKTCSNCGFTITSADYDRVLEKLKKTATGWMTTINGKELKVEGQITYYNRYKRQNVVKDLSVELDRLSEESVNNDISSWTKGRSGEALSLLKKRFSHRPVQEKFVCLNCGFETHADEQAALNIARSWLFLRSQEYKKYQTNKTTGNTDKRAFVETWQSFYRKKLKEVWKPAV

SEQ ID NO: 306 - protein, 978 aa, synthetic construct
QEIKRINKIRRRLVKDSNTKKAGKTGPMKTLLVRVMTPDLRERLENLRKKPENIPQPISNTSRANLNKLLTDYTEMKKAILHVYWEEFQKDPVGLMSRVAQPASKKIDQNKLKPEMDEKGNLTTAGFACSQCGQPLFVYKLEQVSEKGKAYTNYFGRCNVAEHEKLILLAQLKPEKDSDEAVTYSLGKFGQRALDFYSIHVTKESTHPVKPLAQIAGNRYASHPVGKALSGACMGTIASFLSKYQDIIIEHQKVVKGNQKRLESLRELAGKENLEYPSVTLPPQPHTKEGVDAYNEVIARVRMWVNLNLWQKLKLSRDDAKPLLRLKGFPSFPLVERQANEVDWWDMVCNVKKLINEKKEDGKVFWQNLAGYKRQEALRPYLSSEEDRKKGKKFARYQLGDLLLHLEKKHGEDWGKVYDEAWERIDKKVEGLSKHIKLEEERRSEDAQSKAALTDWLRAKASFVIEGLKEADKDEFCRCELKLQKWYGDLRGKPFAIEAENSILDISGFSKQYNCAFIWQKDGVKKLNLYLIINYFKGGKLRFKKIKPEAFEANRFYTVINKKSGEIVPMEVNFNFDDPNLIILPLAFGKRQGREFIWNDLLSLETGSLKLANGRVIEKTLYNRRTRQDEPALFVALTFERREVLDSSNIKPMNLIGVDRGENIPAVIALTDPEGCPLSRFKDSLGNPTHILRIGESYKEKQRTIQAKKEVEQRRAGGYSRKYASKAKNLADDMVRNTARDLLYYAVTQDAMLIFENLSRGFGRQGKRTFMAERQYTRMEDWLTAKLAYEGLPSKTYLSKTLAQYTSKTCSNCGFTITSADYDRVLEKLKKTATGWMTTINGKELKVEGQITYYNRYKRQNVVKDLSVELDRLSEESVNNDISSWTKGRSGEALSLLKKRFSHRPVQEKFVCLNCGFETHADEQAALNIARSWLFLRSQEYKKYQTNKTTGNTDKRAFVETWQSFYRKKLKEVWKPAV

SEQ ID NO: 307 - protein, 979 aa, synthetic construct
QEIKRINKIRRRLVKDSNTKKAGKTRGPMKTLLVRVMTPDLRERLENLRKKPENIPQPISNTSRANLNKLLTDYTEMKKAILHVYWEEFQKDPVGLMSRVAQPASKKIDQNKLKPEMDEKGNLTTAGFACSQCGQPLFVYKLEQVSEKGKAYTNYFGRCNVAEHEKLILLAQLKPEKDSDEAVTYSLGKFGQRALDFYSIHVTKESTHPVKPLAQIAGNRYASYPVGKALSGACMGTIASFLSKYQDIIIEHQKVVKGNQKRLESLRELAGKENLEYPSVTLPPQPHTKEGVDAYNEVIARVRMWVNLNLWQKLKLSRDDAKPLLRLKGFPSFPLVERQANEVDWWDMVCNVKKLINEKKEDGKVFWQNLAGYKRQEALRPYLSSEEDRKKGKKFARYQLGDLLLHLEKKHGEDWGKVYDEAWERIDKKVEGLSKHIKLEEERRSEDAQSKAALTDWLRAKASFVIEGLKEADKDEFCRCELKLQKWYGDLRGKPFAIEAENSILDISGFSKQYNCAFIWQKDGVKKLNLYLIINYFKGGKLRFKKIKPEAFEANRFYTVINKKSGEIVPMEVNFNFDDPNLIILPLAFGKRQGREFIWNDLLSLETGSLKLANGRVIEKTLYNRRTRQDEPALFVALTFERREVLDSSNIKPMNLIGVDRGENIPAVIALTDPEGCPLSRFKDSLGNPTHILRIGESYKEKQRTIQAKKEVEQRRAGGYSRKYASKAKNLADDMVRNTARDLLYYAVTQDAMLIFENLSRGFGRQGKRTFMAERQYTRMEDWLTAKLAYEGLPSKTYLSKTLAQYTSKTCSNCGFTITSADYDRVLEKLKKTATGWMTTINGKELKVEGQITYYNRYKRQNVVKDLSVELDRLSEESVNNDISSWTKGRSGEALSLLKKRFSHRPVQEKFVCLNCGFETHADEQAALNIARSWLFLRSQEYKKYQTNKTTGNTDKRAFVETWQSFYRKKLKEVWKPAV

SEQ ID NO: 308 - protein, 979 aa, synthetic construct
QEIKRINKIRRRLVKDSNTKKAGKTRGPMKTLLVRVMTPDLRERLENLRKKPENIPQPISNTSRANLNKLLTDYTEMKKAILHVYWEEFQKDPVGLMSRVAQPASKKIDQNKLKPEMDEKGNLTTAGFACSQCGQPLFVYKLEQVSEKGKAYTNYFGRCNVAEHEKLILLAQLKPEKDSDEAVTYSLGKFGQRALDFYSIHVTKESTHPVKPLAQIAGNRYASHPVGKALSGACMGTIASFLSKYQDIIIEHQKVVKGNQKRLESLRELAGKENLEYPSVTLPPQPHTKEGVDAYNEVIARVRMWVNLNLWQKLKLSRDDAKPLLRLKGFPSFPLVERQANEVDWWDMVCNVKKLINEKKEDGKVFWQNLAGYKRQEALRPYLSSEEDRKKGKKFARYQLGDLLLHLEKKHGEDWGKVYDEAWERIDKKVEGLSKHIKLEEERRSEDAQSKAALTDWLRAKASFVIEGLKEADKDEFCRCELKLQKWYGDLRGKPFAIEAENSILDISGFSKQYNCAFIWQKDGVKKLNLYLIINYFKGGKLRFKKIKPEAFEANRFYTVINKKSGEIVPMEVNFNFDDPNLIILPLAFGKRQGREFIWNDLLSLETGSLKLANGRVIEKTLYNRRTRQDEPALFVALTFERREVLDSSNIKPMNLIGVDRGENIPAVIALTDPEGCPLSRFKDSLGNPTHILRIGESYKEKQRTIQAKKEVEQRRAGGYSRKYASKAKNLADDMVRNTARDLLYYAVTQDAMLIFENLSRGFGRQGKRTFMAERQYTRMEDWLTAKLAYEGLPSKTYLSKTLAQYTSKTCSNCGFTITSADYDRVLEKLKKTATGWMTTINGKELKVEGQITYYNRYKRQNVVKDLSVELDRLSEESVNNDISSWTKGRSGEALSLLKKRFSHRPVQEKFVCLNCGFETHADEQAALNIARSWLFLRSQEYKKYQTNKTTGNTDKRAFVETWQSFYRKKLKEVWKPAV

SEQ ID NO: 309 - protein, 978 aa, synthetic construct
QEIKRINKIRRRLVKDSNTKKAGKTGPMKTLLVRVMTPDLRERLENLRKKPENIPQPISNTSRANLNKLLTDYTEMKKAILHVYWEEFQKDPVGLMSRVAQPASKKIDQNKLKPEMDEKGNLTTAGFACSQCGQPLFVYKLEQVSEKGKAYTNYFGRCNVAEHEKLIKLAQLKPEKDSDEAVTYSLGKFGQRALDFYSIHVTKESTHPVKPLAQIAGNRYASGPVGKALSGACMGTIASFLSKYQDIIIEHQKVVKGNQKRLESLRELAGKENLEYPSVTLPPQPHTKEGVDAYNEVIARVRMWVNLNLWQKLKLSRDDAKPLLRLKGFPSFPLVERQANEVDWWDMVCNVKKLINEKKEDGKVFWQNLAGYKRQEALRPYLSSEEDRKKGKKFARYQLGDLLLHLEKKHGEDWGKVYDEAWERIDKKVEGLSKHIKLEEERRSEDAQSKAALTDWLRAKASFVIEGLKEADKDEFCRCELKLQKWYGDLRGKPFAIEAENSILDISGFSKQYNCAFIWQKDGVKKLNLYLIINYFKGGKLRFKKIKPEAFEANRFYTVINKKSGEIVPMEVNFNFDDPNLIILPLAFGKRQGREFIWNDLLSLETGSLKLANGRVIEKTLYNRRTRQDEPALFVALTFERREVLDSSNIKPMNLIGVDRGENIPAVIALTDPEGCPLSRFKDSLGNPTHILRIGESYKEKQRTIQAKKEVEQRRAGGYSRKYASKAKNLADDMVRNTARDLLYYAVTQDAMLIFENLSRGFGRQGKRTFMAERQYTRMEDWLTAKLAYEGLPSKTYLSKTLAQYTSKTCSNCGFTITSADYDRVLEKLKKTATGWMTTINGKELKVEGQITYYNRYKRQNVVKDLSVELDRLSEESVNNDISSWTKGRSGEALSLLKKRFSHRPVQEKFVCLNCGFETHADEQAALNIARSWLFLRSQEYKKYQTNKTTGNTDKRAFVETWQSFYRKKLKEVWKPAV

SEQ ID NO: 310 - protein, 978 aa, synthetic construct
QEIKRINKIRRRLVKDSNTKKAGKTGPMKTLLVRVMTPDLRERLENLRKKPENIPQPISNTSRANLNKLLTDYTEMKKAILHVYWEEFQKDPVGLMSRVAQPASKKIDQNKLKPEMDEKGNLTTAGFACSQCGQPLFVYKLEQVSEKGKAYTNYFGRCNVAEHEKLIKLAQLKPEKDSDEAVTYSLGKFGQRALDFYSIHVTKESTHPVKPLAQIAGNRYASYPVGKALSGACMGTIASFLSKYQDIIIEHQKVVKGNQKRLESLRELAGKENLEYPSVTLPPQPHTKEGVDAYNEVIARVRMWVNLNLWQKLKLSRDDAKPLLRLKGFPSFPLVERQANEVDWWDMVCNVKKLINEKKEDGKVFWQNLAGYKRQEALRPYLSSEEDRKKGKKFARYQLGDLLLHLEKKHGEDWGKVYDEAWERIDKKVEGLSKHIKLEEERRSEDAQSKAALTDWLRAKASFVIEGLKEADKDEFCRCELKLQKWYGDLRGKPFAIEAENSILDISGFSKQYNCAFIWQKDGVKKLNLYLIINYFKGGKLRFKKIKPEAFEANRFYTVINKKSGEIVPMEVNFNFDDPNLIILPLAFGKRQGREFIWNDLLSLETGSLKLANGRVIEKTLYNRRTRQDEPALFVALTFERREVLDSSNIKPMNLIGVDRGENIPAVIALTDPEGCPLSRFKDSLGNPTHILRIGESYKEKQRTIQAKKEVEQRRAGGYSRKYASKAKNLADDMVRNTARDLLYYAVTQDAMLIFENLSRGFGRQGKRTFMAERQYTRMEDWLTAKLAYEGLPSKTYLSKTLAQYTSKTCSNCGFTITSADYDRVLEKLKKTATGWMTTINGKELKVEGQITYYNRYKRQNVVKDLSVELDRLSEESVNNDISSWTKGRSGEALSLLKKRFSHRPVQEKFVCLNCGFETHADEQAALNIARSWLFLRSQEYKKYQTNKTTGNTDKRAFVETWQSFYRKKLKEVWKPAV

SEQ ID NO: 311 - protein, 979 aa, synthetic construct
QEIKRINKIRRRLVKDSNTKKAGKTRGPMKTLLVRVMTPDLRERLENLRKKPENIPQPISNTSRANLNKLLTDYTEMKKAILHVYWEEFQKDPVGLMSRVAQPASKKIDQNKLKPEMDEKGNLTTAGFACSQCGQPLFVYKLEQVSEKGKAYTNYFGRCNVAEHEKLIKLAQLKPEKDSDEAVTYSLGKFGQRALDFYSIHVTKESTHPVKPLAQIAGNRYASGPVGKALSGACMGTIASFLSKYQDIIIEHQKVVKGNQKRLESLRELAGKENLEYPSVTLPPQPHTKEGVDAYNEVIARVRMWVNLNLWQKLKLSRDDAKPLLRLKGFPSFPLVERQANEVDWWDMVCNVKKLINEKKEDGKVFWQNLAGYKRQEALRPYLSSEEDRKKGKKFARYQLGDLLLHLEKKHGEDWGKVYDEAWERIDKKVEGLSKHIKLEEERRSEDAQSKAALTDWLRAKASFVIEGLKEADKDEFCRCELKLQKWYGDLRGKPFAIEAENSILDISGFSKQYNCAFIWQKDGVKKLNLYLIINYFKGGKLRFKKIKPEAFEANRFYTVINKKSGEIVPMEVNFNFDDPNLIILPLAFGKRQGREFIWNDLLSLETGSLKLANGRVIEKTLYNRRTRQDEPALFVALTFERREVLDSSNIKPMNLIGVDRGENIPAVIALTDPEGCPLSRFKDSLGNPTHILRIGESYKEKQRTIQAKKEVEQRRAGGYSRKYASKAKNLADDMVRNTARDLLYYAVTQDAMLIFENLSRGFGRQGKRTFMAERQYTRMEDWLTAKLAYEGLPSKTYLSKTLAQYTSKTCSNCGFTITSADYDRVLEKLKKTATGWMTTINGKELKVEGQITYYNRYKRQNVVKDLSVELDRLSEESVNNDISSWTKGRSGEALSLLKKRFSHRPVQEKFVCLNCGFETHADEQAALNIARSWLFLRSQEYKKYQTNKTTGNTDKRAFVETWQSFYRKKLKEVWKPAV

SEQ ID NO: 312 - protein, 979 aa, synthetic construct
QEIKRINKIRRRLVKDSNTKKAGKTRGPMKTLLVRVMTPDLRERLENLRKKPENIPQPISNTSRANLNKLLTDYTEMKKAILHVYWEEFQKDPVGLMSRVAQPASKKIDQNKLKPEMDEKGNLTTAGFACSQCGQPLFVYKLEQVSEKGKAYTNYFGRCNVAEHEKLIKLAQLKPEKDSDEAVTYSLGKFGQRALDFYSIHVTKESTHPVKPLAQIAGNRYASYPVGKALSGACMGTIASFLSKYQDIIIEHQKVVKGNQKRLESLRELAGKENLEYPSVTLPPQPHTKEGVDAYNEVIARVRMWVNLNLWQKLKLSRDDAKPLLRLKGFPSFPLVERQANEVDWWDMVCNVKKLINEKKEDGKVFWQNLAGYKRQEALRPYLSSEEDRKKGKKFARYQLGDLLLHLEKKHGEDWGKVYDEAWERIDKKVEGLSKHIKLEEERRSEDAQSKAALTDWLRAKASFVIEGLKEADKDEFCRCELKLQKWYGDLRGKPFAIEAENSILDISGFSKQYNCAFIWQKDGVKKLNLYLIINYFKGGKLRFKKIKPEAFEANRFYTVINKKSGEIVPMEVNFNFDDPNLIILPLAFGKRQGREFIWNDLLSLETGSLKLANGRVIEKTLYNRRTRQDEPALFVALTFERREVLDSSNIKPMNLIGVDRGENIPAVIALTDPEGCPLSRFKDSLGNPTHILRIGESYKEKQRTIQAKKEVEQRRAGGYSRKYASKAKNLADDMVRNTARDLLYYAVTQDAMLIFENLSRGFGRQGKRTFMAERQYTRMEDWLTAKLAYEGLPSKTYLSKTLAQYTSKTCSNCGFTITSADYDRVLEKLKKTATGWMTTINGKELKVEGQITYYNRYKRQNVVKDLSVELDRLSEESVNNDISSWTKGRSGEALSLLKKRFSHRPVQEKFVCLNCGFETHADEQAALNIARSWLFLRSQEYKKYQTNKTTGNTDKRAFVETWQSFYRKKLKEVWKPAV

SEQ ID NO: 313 - protein, 979 aa, synthetic construct
QEIKRINKIRRRLVKDSNTKKAGKTRGPMKTLLVRVMTPDLRERLENLRKKPENIPQPISNTSRANLNKLLTDYTEMKKAILHVYWEEFQKDPVGLMSRVAQPASKKIDQNKLKPEMDEKGNLTTAGFACSQCGQPLFVYKLEQVSEKGKAYTNYFGRCNVAEHEKLIKLAQLKPEKDSDEAVTYSLGKFGQRALDFYSIHVTKESTHPVKPLAQIAGNRYASHPVGKALSGACMGTIASFLSKYQDIIIEHQKVVKGNQKRLESLRELAGKENLEYPSVTLPPQPHTKEGVDAYNEVIARVRMWVNLNLWQKLKLSRDDAKPLLRLKGFPSFPLVERQANEVDWWDMVCNVKKLINEKKEDGKVFWQNLAGYKRQEALRPYLSSEEDRKKGKKFARYQLGDLLLHLEKKHGEDWGKVYDEAWERIDKKVEGLSKHIKLEEERRSEDAQSKAALTDWLRAKASFVIEGLKEADKDEFCRCELKLQKWYGDLRGKPFAIEAENSILDISGFSKQYNCAFIWQKDGVKKLNLYLIINYFKGGKLRFKKIKPEAFEANRFYTVINKKSGEIVPMEVNFNFDDPNLIILPLAFGKRQGREFIWNDLLSLETGSLKLANGRVIEKTLYNRRTRQDEPALFVALTFERREVLDSSNIKPMNLIGVDRGENIPAVIALTDPEGCPLSRFKDSLGNPTHILRIGESYKEKQRTIQAKKEVEQRRAGGYSRKYASKAKNLADDMVRNTARDLLYYAVTQDAMLIFENLSRGFGRQGKRTFMAERQYTRMEDWLTAKLAYEGLPSKTYLSKTLAQYTSKTCSNCGFTITSADYDRVLEKLKKTATGWMTTINGKELKVEGQITYYNRYKRQNVVKDLSVELDRLSEESVNNDISSWTKGRSGEALSLLKKRFSHRPVQEKFVCLNCGFETHADEQAALNIARSWLFLRSQEYKKYQTNKTTGNTDKRAFVETWQSFYRKKLKEVWKPAV

SEQ ID NO: 314 - protein, 979 aa, synthetic construct; identical to SEQ ID NO: 162

SEQ ID NO: 315 - protein, 979 aa, synthetic construct
QEIKRINKIRRRLVKDSNTKKAGKTRGPMKTLLVRVMTPDLRERLENLRKKPENIPQPISNTSRANLNKLLTDYTEMKKAILHVYWEEFQKDPVGLMSRVAQPASKKIDQNKLKPEMDEKGNLTTAGFACSQCGQPLFVYKLEQVSEKGKAYTNYFGRCNVAEHEKLILLAQLKPEKDSDEAVTYSLGKFGQRALDFYSIHVTKESTHPVKPLAQIAGNRYASHPVGKALSDACMGTIASFLSKYQDIIIEHQKVVKGNQKRLESLRELAGKENLEYPSVTLPPQPHTKEGVDAYNEVIARVRMWVNLNLWQKLKLSRDDAKPLLRLKGFPSFPLVERQANEVDWWDMVCNVKKLINEKKEDGKVFWQNLAGYKRQEALRPYLSSEEDRKKGKKFARYQLGDLLLHLEKKHGEDWGKVYDEAWERIDKKVEGLSKHIKLEEERRSEDAQSKAALTDWLRAKASFVIEGLKEADKDEFCRCELKLQKWYGDLRGKPFAIEAENSILDISGFSKQYNCAFIWQKDGVKKLNLYLIINYFKGGKLRFKKIKPEAFEANRFYTVINKKSGEIVPMEVNFNFDDPNLIILPLAFGKRQGREFIWNDLLSLETGSLKLANGRVIEKTLYNRRTRQDEPALFVALTFERREVLDSSNIKPMNLIGVDRGENIPAVIALTDPEGCPLSRFKDSLGNPTHILRIGESYKEKQRTIQAKKEVEQRRAGGYSRKYASKAKNLADDMVRNTARDLLYYAVTQDAMLIFENLSRGFGRQGKRTFMAERQYTRMEDWLTAKLAYEGLPSKTYLSKTLAQYTSKTCSNCGFTITSADYDRVLEKLKKTATGWMTTINGKELKVEGQITYYNRYKRQNVVKDLSVELDRLSEESVNNDISSWTKGRSGEALSLLKKRFSHRPVQEKFVCLNCGFETHADEQAALNIARSWLFLRSQEYKKYQTNKTTGNTDKRAFVETWQSFYRKKLKEVWKPAV

SEQ ID NO: 316 - protein, 978 aa, synthetic construct; identical to SEQ ID NO: 211

SEQ ID NO: 317 - protein, 978 aa, synthetic construct
QEIKRINKIRRRLVKDSNTKKAGKTGPMKTLLVRVMTPDLRERLENLRKKPENIPQPISNTSRANLNKLLTDYTEMKKAILHVYWEEFQKDPVGLMSRVAQPASKKIDQNKLKPEMDEKGNLTTAGFACSQCGQPLFVYKLEQVSEKGKAYTNYFGRCNVAEHEKLIKLAQLKPEKDSDEAVTYSLGKFGQRALDFYSIHVTKESTHPVKPLAQIAGNRYASYPVGKALSDACMGTIASFLSKYQDIIIEHQKVVKGNQKRLESLRELAGKENLEYPSVTLPPQPHTKEGVDAYNEVIARVRMWVNLNLWQKLKLSRDDAKPLLRLKGFPSFPLVERQANEVDWWDMVCNVKKLINEKKEDGKVFWQNLAGYKRQEALRPYLSSEEDRKKGKKFARYQLGDLLLHLEKKHGEDWGKVYDEAWERIDKKVEGLSKHIKLEEERRSEDAQSKAALTDWLRAKASFVIEGLKEADKDEFCRCELKLQKWYGDLRGKPFAIEAENSILDISGFSKQYNCAFIWQKDGVKKLNLYLIINYFKGGKLRFKKIKPEAFEANRFYTVINKKSGEIVPMEVNFNFDDPNLIILPLAFGKRQGREFIWNDLLSLETGSLKLANGRVIEKTLYNRRTRQDEPALFVALTFERREVLDSSNIKPMNLIGVDRGENIPAVIALTDPEGCPLSRFKDSLGNPTHILRIGESYKEKQRTIQAKKEVEQRRAGGYSRKYASKAKNLADDMVRNTARDLLYYAVTQDAMLIFENLSRGFGRQGKRTFMAERQYTRMEDWLTAKLAYEGLPSKTYLSKTLAQYTSKTCSNCGFTITSADYDRVLEKLKKTATGWMTTINGKELKVEGQITYYNRYKRQNVVKDLSVELDRLSEESVNNDISSWTKGRSGEALSLLKKRFSHRPVQEKFVCLNCGFETHADEQAALNIARSWLFLRSQEYKKYQTNKTTGNTDKRAFVETWQSFYRKKLKEVWKPAV

SEQ ID NO: 318 - protein, 978 aa, synthetic construct
QEIKRINKIRRRLVKDSNTKKAGKTGPMKTLLVRVMTPDLRERLENLRKKPENIPQPISNTSRANLNKLLTDYTEMKKAILHVYWEEFQKDPVGLMSRVAQPASKKIDQNKLKPEMDEKGNLTTAGFACSQCGQPLFVYKLEQVSEKGKAYTNYFGRCNVAEHEKLIKLAQLKPEKDSDEAVTYSLGKFGQRALDFYSIHVTKESTHPVKPLAQIAGNRYASHPVGKALSDACMGTIASFLSKYQDIIIEHQKVVKGNQKRLESLRELAGKENLEYPSVTLPPQPHTKEGVDAYNEVIARVRMWVNLNLWQKLKLSRDDAKPLLRLKGFPSFPLVERQANEVDWWDMVCNVKKLINEKKEDGKVFWQNLAGYKRQEALRPYLSSEEDRKKGKKFARYQLGDLLLHLEKKHGEDWGKVYDEAWERIDKKVEGLSKHIKLEEERRSEDAQSKAALTDWLRAKASFVIEGLKEADKDEFCRCELKLQKWYGDLRGKPFAIEAENSILDISGFSKQYNCAFIWQKDGVKKLNLYLIINYFKGGKLRFKKIKPEAFEANRFYTVINKKSGEIVPMEVNFNFDDPNLIILPLAFGKRQGREFIWNDLLSLETGSLKLANGRVIEKTLYNRRTRQDEPALFVALTFERREVLDSSNIKPMNLIGVDRGENIPAVIALTDPEGCPLSRFKDSLGNPTHILRIGESYKEKQRTIQAKKEVEQRRAGGYSRKYASKAKNLADDMVRNTARDLLYYAVTQDAMLIFENLSRGFGRQGKRTFMAERQYTRMEDWLTAKLAYEGLPSKTYLSKTLAQYTSKTCSNCGFTITSADYDRVLEKLKKTATGWMTTINGKELKVEGQITYYNRYKRQNVVKDLSVELDRLSEESVNNDISSWTKGRSGEALSLLKKRFSHRPVQEKFVCLNCGFETHADEQAALNIARSWLFLRSQEYKKYQTNKTTGNTDKRAFVETWQSFYRKKLKEVWKPAV

SEQ ID NO: 319 - protein, 979 aa, synthetic construct
QEIKRINKIRRRLVKDSNTKKAGKTRGPMKTLLVRVMTPDLRERLENLRKKPENIPQPISNTSRANLNKLLTDYTEMKKAILHVYWEEFQKDPVGLMSRVAQPASKKIDQNKLKPEMDEKGNLTTAGFACSQCGQPLFVYKLEQVSEKGKAYTNYFGRCNVAEHEKLIKLAQLKPEKDSDEAVTYSLGKFGQRALDFYSIHVTKESTHPVKPLAQIAGNRYASYPVGKALSDACMGTIASFLSKYQDIIIEHQKVVKGNQKRLESLRELAGKENLEYPSVTLPPQPHTKEGVDAYNEVIARVRMWVNLNLWQKLKLSRDDAKPLLRLKGFPSFPLVERQANEVDWWDMVCNVKKLINEKKEDGKVFWQNLAGYKRQEALRPYLSSEEDRKKGKKFARYQLGDLLLHLEKKHGEDWGKVYDEAWERIDKKVEGLSKHIKLEEERRSEDAQSKAALTDWLRAKASFVIEGLKEADKDEFCRCELKLQKWYGDLRGKPFAIEAENSILDISGFSKQYNCAFIWQKDGVKKLNLYLIINYFKGGKLRFKKIKPEAFEANRFYTVINKKSGEIVPMEVNFNFDDPNLIILPLAFGKRQGREFIWNDLLSLETGSLKLANGRVIEKTLYNRRTRQDEPALFVALTFERREVLDSSNIKPMNLIGVDRGENIPAVIALTDPEGCPLSRFKDSLGNPTHILRIGESYKEKQRTIQAKKEVEQRRAGGYSRKYASKAKNLADDMVRNTARDLLYYAVTQDAMLIFENLSRGFGRQGKRTFMAERQYTRMEDWLTAKLAYEGLPSKTYLSKTLAQYTSKTCSNCGFTITSADYDRVLEKLKKTATGWMTTINGKELKVEGQITYYNRYKRQNVVKDLSVELDRLSEESVNNDISSWTKGRSGEALSLLKKRFSHRPVQEKFVCLNCGFETHADEQAALNIARSWLFLRSQEYKKYQTNKTTGNTDKRAFVETWQSFYRKKLKEVWKPAV

SEQ ID NO: 320 - protein, 979 aa, synthetic construct
QEIKRINKIRRRLVKDSNTKKAGKTRGPMKTLLVRVMTPDLRERLENLRKKPENIPQPISNTSRANLNKLLTDYTEMKKAILHVYWEEFQKDPVGLMSRVAQPASKKIDQNKLKPEMDEKGNLTTAGFACSQCGQPLFVYKLEQVSEKGKAYTNYFGRCNVAEHEKLIKLAQLKPEKDSDEAVTYSLGKFGQRALDFYSIHVTKESTHPVKPLAQIAGNRYASHPVGKALSDACMGTIASFLSKYQDIIIEHQKVVKGNQKRLESLRELAGKENLEYPSVTLPPQPHTKEGVDAYNEVIARVRMWVNLNLWQKLKLSRDDAKPLLRLKGFPSFPLVERQANEVDWWDMVCNVKKLINEKKEDGKVFWQNLAGYKRQEALRPYLSSEEDRKKGKKFARYQLGDLLLHLEKKHGEDWGKVYDEAWERIDKKVEGLSKHIKLEEERRSEDAQSKAALTDWLRAKASFVIEGLKEADKDEFCRCELKLQKWYGDLRGKPFAIEAENSILDISGFSKQYNCAFIWQKDGVKKLNLYLIINYFKGGKLRFKKIKPEAFEANRFYTVINKKSGEIVPMEVNFNFDDPNLIILPLAFGKRQGREFIWNDLLSLETGSLKLANGRVIEKTLYNRRTRQDEPALFVALTFERREVLDSSNIKPMNLIGVDRGENIPAVIALTDPEGCPLSRFKDSLGNPTHILRIGESYKEKQRTIQAKKEVEQRRAGGYSRKYASKAKNLADDMVRNTARDLLYYAVTQDAMLIFENLSRGFGRQGKRTFMAERQYTRMEDWLTAKLAYEGLPSKTYLSKTLAQYTSKTCSNCGFTITSADYDRVLEKLKKTATGWMTTINGKELKVEGQITYYNRYKRQNVVKDLSVELDRLSEESVNNDISSWTKGRSGEALSLLKKRFSHRPVQEKFVCLNCGFETHADEQAALNIARSWLFLRSQEYKKYQTNKTTGNTDKRAFVETWQSFYRKKLKEVWKPAV

SEQ ID NO: 321 - protein, 978 aa, synthetic construct
QEIKRINKIRRRLVKDSNTKKAGKTGPMKTLLVRVMTPDLRERLENLRKKPENIPQPISNTSRANLNKLLTDYTEMKKAILHVYWEEFQKDPVGLMSRVAQPASKKIDQNKLKPEMDEKGNLTTAGFACSQCGQPLFVYKLEQVSEKGKAYTNYFGRCNVAEHEKLIKLAQLKPEKDSDEAVTYSLGKFGQRALDFYSIHVTKESTHPVKPLAQIAGNRYASHPVGKALSGACMGTIASFLSKYQDIIIEHQKVVKGNQKRLESLRELAGKENLEYPSVTLPPQPHTKEGVDAYNEVIARVRMWVNLNLWQKLKLSRDDAKPLLRLKGFPSFPLVERQANEVDWWDMVCNVKKLINEKKEDGKVFWQNLAGYKRQEALRPYLSSEEDRKKGKKFARYQLGDLLLHLEKKHGEDWGKVYDEAWERIDKKVEGLSKHIKLEEERRSEDAQSKAALTDWLRAKASFVIEGLKEADKDEFCRCELKLQKWYGDLRGKPFAIEAENSILDISGFSKQYNCAFIWQKDGVKKLNLYLIINYFKGGKLRFKKIKPEAFEANRFYTVINKKSGEIVPMEVNFNFDDPNLIILPLAFGKRQGREFIWNDLLSLETGSLKLANGRVIEKTLYNRRTRQDEPALFVALTFERREVLDSSNIKPMNLIGVDRGENIPAVIALTDPEGCPLSRFKDSLGNPTHILRIGESYKEKQRTIQAKKEVEQRRAGGYSRKYASKAKNLADDMVRNTARDLLYYAVTQDAMLIFENLSRGFGRQGKRTFMAERQYTRMEDWLTAKLAYEGLPSKTYLSKTLAQYTSKTCSNCGFTITSADYDRVLEKLKKTATGWMTTINGKELKVEGQITYYNRYKRQNVVKDLSVELDRLSEESVNNDISSWTKGRSGEALSLLKKRFSHRPVQEKFVCLNCGFETHADEQAALNIARSWLFLRSQEYKKYQTNKTTGNTDKRAFVETWQSFYRKKLKEVWKPAV

SEQ ID NO: 322 - protein, 979 aa, synthetic construct
QEIKRINKIRRRLVKDSNTKKAGKTRGPMKTLLVRVMTPDLRERLENLRKKPENIPQPISNTSRANLNKLLTDYTEMKKAILHVYWEEFQKDPVGLMSRVAQPASKKIDQNKLKPEMDEKGNLTTAGFACSQCGQPLFVYKLEQVSEKGKAYTNYFGRCNVAEHEKLILLAQLKPEKDSDEAVTYSLGKFGQRALDFYSIHVTKESTHPVKPLAQIAGNRYASYPVGKALSDACMGTIASFLSKYQDIIIEHQKVVKGNQKRLESLRELAGKENLEYPSVTLPPQPHTKEGVDAYNEVIARVRMWVNLNLWQKLKLSRDDAKPLLRLKGFPSFPLVERQANEVDWWDMVCNVKKLINEKKEDGKVFWQNLAGYKRQEALRPYLSSEEDRKKGKKFARYQLGDLLLHLEKKHGEDWGKVYDEAWERIDKKVEGLSKHIKLEEERRSEDAQSKAALTDWLRAKASFVIEGLKEADKDEFCRCELKLQKWYGDLRGKPFAIEAENSILDISGFSKQYNCAFIWQKDGVKKLNLYLIINYFKGGKLRFKKIKPEAFEANRFYTVINKKSGEIVPMEVNFNFDDPNLIILPLAFGKRQGREFIWNDLLSLETGSLKLANGRVIEKTLYNRRTRQDEPALFVALTFERREVLDSSNIKPMNLIGVARGENIPAVIALTDPEGCPLSRFKDSLGNPTHILRIGESYKEKQRTIQAKKEVEQRRAGGYSRKYASKAKNLADDMVRNTARDLLYYAVTQDAMLIFANLSRGFGRQGKRTFMAERQYTRMEDWLTAKLAYEGLPSKTYLSKTLAQYTSKTCSNCGFTITSADYDRVLEKLKKTATGWMTTINGKELKVEGQITYYNRYKRQNVVKDLSVELDRLSEESVNNDISSWTKGRSGEALSLLKKRFSHRPVQEKFVCLNCGFETHAAEQAALNIARSWLFLRSQEYKKYQTNKTTGNTDKRAFVETWQSFYRKKLKEVWKPAV

SEQ ID NO: 323 - protein, 977 aa, synthetic construct
QEIKRINKIRRRLVKDSNTKKAGKTGPMKTLLVRVMTPDLRERLENLRKKPENIPQPISNTSRANLNKLLTDYTEMKKAILHVYWEEFQKDPVGLMSRVAQPASKKIDQNKLKPEMDEKGNLTTAGFACSQCGQPLFVYKLEQVSEKGKAYTNYFGRCNVAEHEKLILLAQLKPEKDSDEAVTYSLGKFGQRALDFYSIHVTKESTHPVKPLAQIAGNRYASGPVGKALSDACMGTIASFLSKYQDIIIEHQKVVKGNQKRLESLRELAGKENLEYPSVTLPPQPHTKEGVDAYNEVIARVRMWVNLNLWQKLKLSRDDAKPLLRLKGFPSFPLVERQANEVDWWDMVCNVKKLINEKKEDGKVFWQNLAGYKRQEALRPYLSSEEDRKKGKKFARYQLGDLLLHLEKKHGEDWGKVYDEAWERIDKKVEGLSKHIKLEEERRSEDAQSKAALTDWLRAKASFVIEGLKEADKDEFCRCELKLQKWYGDLRGKPFAIEAENSILDISGFSKQYNCAFIWQKDGVKKLNLYLIINYFKGGKLRFKKIKPEAFEANRFYTVINKKSGEIVPMEVNFNFDDPNLIILPLAFGKRQGREFIWNDLLSLETGSLKLANGRVIEKTLYNRRTRQDEPALFVALTFERREVLDSSNIKPMNLIGVARGENIPAVIALTDPEGCPLSRFKDSLGNPTHILRIGESYKEKQRTIQAKKEVEQRRAGGYSRKYASKAKNLADDMVRNTARDLLYYAVTQDAMLIFANLSRGFGRQGKRTFMAERQYTRMEDWLTAKLAYEGLSKTYLSKTLAQYTSKTCSNCGFTITSADYDRVLEKLKKTATGWMTTINGKELKVEGQITYYNRYKRQNVVKDLSVELDRLSEESVNNDISSWTKGRSGEALSLLKKRFSHRPVQEKFVCLNCGFETHAAEQAALNIARSWLFLRSQEYKKYQTNKTTGNTDKRAFVETWQSFYRKKLKEVWKPAV

SEQ ID NO: 324 - protein, 979 aa, synthetic construct
QEIKRINKIRRRLVKDSNTKKAGKTRGPMKTLLVRVMTPDLRERLENLRKKPENIPQPISNTSRANLNKLLTDYTEMKKAILHVYWEEFQKDPVGLMSRVAQPASKKIDQNKLKPEMDEKGNLTTAGFACSQCGQPLFVYKLEQVSEKGKAYTNYFGRCNVAEHEKLILLAQLKPEKDSDEAVTYSLGKFGQRALDFYSIHVTKESTHPVKPLAQIAGNRYASGPVGKALSDACMGTIASFLSKYQDIIIEHQKVVKGNQKRLESLRELAGKENLEYPSVTLPPQPHTKEGVDAYNEVIARVRMWVNLNLWQKLKLSRDDAKPLLRLKGFPSFPLVERQANEVDWWDMVCNVKKLINEKKEDGKVFWQNLAGYKRQEALRPYLSSEEDRKKGKKFARYQLGDLLLHLEKKHGEDWGKVYDEAWERIDKKVEGLSKHIKLEEERRSEDAQSKAALTDWLRAKASFVIEGLKEADKDEFCRCELKLQKWYGDLRGKPFAIEAENSILDISGFSKQYNCAFIWQKDGVKKLNLYLIINYFKGGKLRFKKIKPEAFEANRFYTVINKKSGEIVPMEVNFNFDDPNLIILPLAFGKRQGREFIWNDLLSLETGSLKLANGRVIEKTLYNRRTRQDEPALFVALTFERREVLDSSNIKPMNLIGVARGENIPAVIALTDPEGCPLSRFKDSLGNPTHILRIGESYKEKQRTIQAKKEVEQRRAGGYSRKYASKAKNLADDMVRNTARDLLYYAVTQDAMLIFANLSRGFGRQGKRTFMAERQYTRMEDWLTAKLAYEGLPSKTYLSKTLAQYTSKTCSNCGFTITSADYDRVLEKLKKTATGWMTTINGKELKVEGQITYYNRYKRQNVVKDLSVELDRLSEESVNNDISSWTKGRSGEALSLLKKRFSHRPVQEKFVCLNCGFETHAAEQAALNIARSWLFLRSQEYKKYQTNKTTGNTDKRAFVETWQSFYRKKLKEVWKPAV

SEQ ID NO: 325 - protein, 978 aa, synthetic construct
QEIKRINKIRRRLVKDSNTKKAGKTGPMKTLLVRVMTPDLRERLENLRKKPENIPQPISNTSRANLNKLLTDYTEMKKAILHVYWEEFQKDPVGLMSRVAQPASKKIDQNKLKPEMDEKGNLTTAGFACSQCGQPLFVYKLEQVSEKGKAYTNYFGRCNVAEHEKLILLAQLKPEKDSDEAVTYSLGKFGQRALDFYSIHVTKESTHPVKPLAQIAGNRYASNPVGKALSDACMGTIASFLSKYQDIIIEHQKVVKGNQKRLESLRELAGKENLEYPSVTLPPQPHTKEGVDAYNEVIARVRMWVNLNLWQKLKLSRDDAKPLLRLKGFPSFPLVERQANEVDWWDMVCNVKKLINEKKEDGKVFWQNLAGYKRQEALRPYLSSEEDRKKGKKFARYQLGDLLLHLEKKHGEDWGKVYDEAWERIDKKVEGLSKHIKLEEERRSEDAQSKAALTDWLRAKASFVIEGLKEADKDEFCRCELKLQKWYGDLRGKPFAIEAENSILDISGFSKQYNCAFIWQKDGVKKLNLYLIINYFKGGKLRFKKIKPEAFEANRFYTVINKKSGEIVPMEVNFNFDDPNLIILPLAFGKRQGREFIWNDLLSLETGSLKLANGRVIEKTLYNRRTRQDEPALFVALTFERREVLDSSNIKPMNLIGVARGENIPAVIALTDPEGCPLSRFKDSLGNPTHILRIGESYKEKQRTIQAKKEVEQRRAGGYSRKYASKAKNLADDMVRNTARDLLYYAVTQDAMLIFANLSRGFGRQGKRTFMAERQYTRMEDWLTAKLAYEGLPSKTYLSKTLAQYTSKTCSNCGFTITSADYDRVLEKLKKTATGWMTTINGKELKVEGQITYYNRYKRQNVVKDLSVELDRLSEESVNNDISSWTKGRSGEALSLLKKRFSHRPVQEKFVCLNCGFETHAAEQAALNIARSWLFLRSQEYKKYQTNKTTGNTDKRAFVETWQSFYRKKLKEVWKPAV

SEQ ID NO: 326 - protein, 979 aa, synthetic construct
QEIKRINKIRRRLVKDSNTKKAGKTGPMKTLLVRVMTPDLRERLENLRKKPENIPQPISNTSRANLNKLLTDYTEMKKAILHVYWEEFQKDPVGLMSRVAQPASKKIDQNKLKPEMDEKGNLTTAGFACSQCGQPLFVYKLEQVSEKGKAYTNYFGRCNVAEHEKLILLAQLKPEKDSDEAVTYSLGKFGQRALDFYSIHVTKESTHPVKPLAQIAGNRYASGPVGKALSDACMGTIASFLSKYQDIIIEHQKVVKGNQKRLESLRELAGKENLEYPSVTLPPQPHTKEGVDAYNEVIARVRMWVNLNLWQKLKLSRDDAKPLLRLKGFPSFPLVERQANEVDWWDMVCNVKKLINEKKEDGKVFWQNLAGYKRQEALRPYLSSEEDRKKGKKFARYQLGDLLLHLEKKHGEDWGKVYDEAWERIDKKVEGLSKHIKLEEERRSEDAQSKAALTDWLRAKASFVIEGLKEADKDEFCRCELKLQKWYGDLRGKPFAIEAENSILDISGFSKQYNCAFIWQKDGVKKLNLYLIINYFKGYGKLRFKKIKPEAFEANRFYTVINKKSGEIVPMEVNFNFDDPNLIILPLAFGKRQGREFIWNDLLSLETGSLKLANGRVIEKTLYNRRTRQDEPALFVALTFERREVLDSSNIKPMNLIGVARGENIPAVIALTDPEGCPLSRFKDSLGNPTHILRIGESYKEKQRTIQAKKEVEQRRAGGYSRKYASKAKNLADDMVRNTARDLLYYAVTQDAMLIFANLSRGFGRQGKRTFMAERQYTRMEDWLTAKLAYEGLPSKTYLSKTLAQYTSKTCSNCGFTITSADYDRVLEKLKKTATGWMTTINGKELKVEGQITYYNRYKRQNVVKDLSVELDRLSEESVNNDISSWTKGRSGEALSLLKKRFSHRPVQEKFVCLNCGFETHAAEQAALNIARSWLFLRSQEYKKYQTNKTTGNTDKRAFVETWQSFYRKKLKEVWKPAV

SEQ ID NO: 327 - protein, 979 aa, synthetic construct
QEIKRINKIRRRLVKDSNTKKAGKTGPMKTLLVRVMTPDLRERLENLRKKPENIPQPISNTSRANLNKLLTDYTEMKKAILHVYWEEFQKDPVGLMSRVAQPASKKIDQNKLKPEMDEKGNLTTAGFACSQCGQPLFVYKLEQVSEKGKAYTNYFGRCNVAEHEKLILLAQLKPEKDSDEAVTYSLGKFGQRALDFYSIHVTKESTHPVKPLAQIAGNRYASGPVGKALSDACMGTIASFLSKYQDIIIEHQKVVKGNQKRLESLRELAGKENLEYPSVTLPPQPHTKEGVDAYNEVIARVRMWVNLNLWQKLKLSRDDAKPLLRLKGFPSFPLVERQANEVDWWDMVCNVKKLINEKKEDGKVFWQNLAGYKRQEALRPYLSSEEDRKKGKKFARYQLGDLLLHLEKKHGEDWGKVYDEAWERIDKKVEGLSKHIKLEEERRSEDAQSKAALTDWLRAKASFVIEGLKEADKDEFCRCELKLQKWYGDLRGKPFAIEAENSILDISGFSKQYNCAFIWQKDGVKKLNLYLIINYFKGWGKLRFKKIKPEAFEANRFYTVINKKSGEIVPMEVNFNFDDPNLIILPLAFGKRQGREFIWNDLLSLETGSLKLANGRVIEKTLYNRRTRQDEPALFVALTFERREVLDSSNIKPMNLIGVARGENIPAVIALTDPEGCPLSRFKDSLGNPTHILRIGESYKEKQRTIQAKKEVEQRRAGGYSRKYASKAKNLADDMVRNTARDLLYYAVTQDAMLIFANLSRGFGRQGKRTFMAERQYTRMEDWLTAKLAYEGLPSKTYLSKTLAQYTSKTCSNCGFTITSADYDRVLEKLKKTATGWMTTINGKELKVEGQITYYNRYKRQNVVKDLSVELDRLSEESVNNDISSWTKGRSGEALSLLKKRFSHRPVQEKFVCLNCGFETHAAEQAALNIARSWLFLRSQEYKKYQTNKTTGNTDKRAFVETWQSFYRKKLKEVWKPAV

SEQ ID NO: 328 - protein, 978 aa, synthetic construct
QEIKRINKIRRRLVKDSNTKKAGKTGPMKTLLVRVMTPDLRERLENLRKKPENIPQPISNTSRANLNKLLTDYTEMKKAILHVYWEEFQKDPVGLMSRVAQPASKKIDQNKLKPEMDEKGNLTTAGFACSQCGQPLFVYKLEQVSEKGKAYTNYFGRCNVAEHEKLILLAQLKPEKDSDEAVTYSLGKFGQRALDFYSIHVTKESTHPVKPLAQIAGNRYASYPVGKALSDACMGTIASFLSKYQDIIIEHQKVVKGNQKRLESLRELAGKENLEYPSVTLPPQPHTKEGVDAYNEVIARVRMWVNLNLWQKLKLSRDDAKPLLRLKGFPSFPLVERQANEVDWWDMVCNVKKLINEKKEDGKVFWQNLAGYKRQEALRPYLSSEEDRKKGKKFARYQLGDLLLHLEKKHGEDWGKVYDEAWERIDKKVEGLSKHIKLEEERRSEDAQSKAALTDWLRAKASFVIEGLKEADKDEFCRCELKLQKWYGDLRGKPFAIEAENSILDISGFSKQYNCAFIWQKDGVKKLNLYLIINYFKGGKLRFKKIKPEAFEANRFYTVINKKSGEIVPMEVNFNFDDPNLIILPLAFGKRQGREFIWNDLLSLETGSLKLANGRVIEKTLYNRRTRQDEPALFVALTFERREVLDSSNIKPMNLIGVARGENIPAVIALTDPEGCPLSRFKDSLGNPTHILRIGESYKEKQRTIQAKKEVEQRRAGGYSRKYASKAKNLADDMVRNTARDLLYYAVTQDAMLIFANLSRGFGRQGKRTFMAERQYTRMEDWLTAKLAYEGLPSKTYLSKTLAQYTSKTCSNCGFTITSADYDRVLEKLKKTATGWMTTINGKELKVEGQITYYNRYKRQNVVKDLSVELDRLSEESVNNDISSWTKGRSGEALSLLKKRFSHRPVQEKFVCLNCGFETHAAEQAALNIARSWLFLRSQEYKKYQTNKTTGNTDKRAFVETWQSFYRKKLKEVWKPAV

SEQ ID NO: 329 - protein, 978 aa, synthetic construct
QEIKRINKIRRRLVKDSNTKKAGKTRGPMKTLLVRVMTPDLRERLENLRKKPENIPQPISNTSRANLNKLLTDYTEMKKAILHVYWEEFQKDPVGLMSRVAQPASKKIDQNKLKPEMDEKGNLTTAGFACSQCGQPLFVYKLEQVSEKGKAYTNYFGRCNVAEHEKLILLAQLKPEKDSDEAVTYSLGKFGQRALDFYSIHVTKESTHPVKPLAQIAGNRYASGPVGKALSDACMGTIASFLSKYQDIIIEHQKVVKGNQKRLESLRELAGKENLEYPSVTLPPQPHTKEGVDAYNEVIARVRMWVNLNLWQKLKLSRDDAKPLLRLKGFPSFPLVERQANEVDWWDMVCNVKKLINEKKEDGKVFWQNLAGYKRQEALRPYLSSEEDRKKGKKFARYQLGDLLLHLEKKHGEDWGKVYDEAWERIDKKVEGLSKHIKLEEERRSEDAQSKAALTDWLRAKASFVIEGLKEADKDEFCRCELKLQKWYGDLRGKPFAIEAENSILDISGFSKQYNCAFIWQKDGVKKLNLYLIINYFKGGKLRFKKIKPEAFEANRFYTVINKKSGEIVPMEVNFNFDDPNLIILPLAFGKRQGREFIWNDLLSLETGSLKLANGRVIEKTLYNRRTRQDEPALFVALTFERREVLDSSNIKPMNLIGVARGENIPAVIALTDPEGCPLSRFKDSLGNPTHILRIGESYKEKQRTIQAKKEVEQRRAGGYSRKYASKAKNLADDMVRNTARDLLYYAVTQDAMLIFANLSRGFGRQGKRTFMAERQYTRMEDWLTAKLAYEGLSKTYLSKTLAQYTSKTCSNCGFTITSADYDRVLEKLKKTATGWMTTINGKELKVEGQITYYNRYKRQNVVKDLSVELDRLSEESVNNDISSWTKGRSGEALSLLKKRFSHRPVQEKFVCLNCGFETHAAEQAALNIARSWLFLRSQEYKKYQTNKTTGNTDKRAFVETWQSFYRKKLKEVWKPAV

SEQ ID NO: 330 - protein, 978 aa, synthetic construct
QEIKRINKIRRRLVKDSNTKKAGKTGPMKTLLVRVMTPDLRERLENLRKKPENIPQPISNTSRANLNKLLTDYTEMKKAILHVYWEEFQKDPVGLMSRVAQPASKKIDQNKLKPEMDEKGNLTTAGFACSQCGQPLFVYKLEQVSEKGKAYTNYFGRCNVAEHEKLILLAQLKPEKDSDEAVTYSLGKFGQRALDFYSIHVTKESTHPVKPLAQIAGNRYASGPVGKALSDACMGTIASFLSKYQDIIIEHQKVVKGNQKRLESLRELAGKENLEYPSVTLPPQPHTKEGVDAYNEVIARVRMWVNLNLWQKLKLSRDDAKPLLRLKGFPSFPLVERQANEVDWWDMVCNVKKLINEKKEDGKVFWQNLAGYKRQEALRPYLSSEEDRKKGKKFARYQLGDLLLHLEKKHGEDWGKVYDEAWERIDKKVEGLSKHIKLEEERRSEDAQSKAALTDWLRAKASFVIEGLKEADKDEFCRCELKLQKWYGDLRGKPFAIEAENSILDISGFSKQYNCAFIWQKDGVKKLNLYLIINYFKGGKLRFKKIKPEAFEANRFYTVINKKSGEIVPMEVNFNFDDPNLIILPLAFGKRQGREFIWNDLLSLETGSLKLANGRVIEKTLYNRRTRQDEPALFVALTFERREVLDSSNIKPMNLIGVARGENIPAVIALTDPEGCPLSRFKDSLGNPTHILRIGESYKEKQRTIQAKKEVEQRRAGGYSRKYASKAKNLADDMVRNTARDLLYYAVTQDAMLIFANLSRGFGRQGKRTFMAERQYTRMEDWLTAKLAYEGLPSKTYLSKTLAQYTSKTCSNCGFTITSADYDRVLEKLKKTATGWMTTINGKELKVEGQITYYNRYKRQNVVKDLSVELDRLSEESVNNDISSWTKGRSGEALSLLKKRFSHRPVQEKFVCLNCGFETHAAEQAALNIARSWLFLRSQEYKKYQTNKTTGNTDKRAFVETWQSFYRKKLKEVWKPAV

SEQ ID NO: 331 - protein, 978 aa, synthetic construct
QEIKRINKIRRRLVKDSNTKKAGKTGPMKTLLVRVMTPDLRERLENLRKKPENIPQPISNTSRANLNKLLTDYTEMKKAILHVYWEEFQKDPVGLMSRVAQPASKKIDQNKLKPEMDEKGNLTTAGFACSQCGQPLFVYKLEQVSEKGKAYTNYFGRCNVAEHEKLILLAQLKPEKDSDEAVTYSLGKFGQRALDFYSIHVTKESTHPVKPLAQIAGNRYASGPVGKALSDACMGTIASFLSKYQDIIIEHQKVVKGNQKRLESLRELAGKENLEYPSVTLPPQPHTKEGVDAYNEVIARVRMWVNLNLWQKLKLSRDDAKPLLRLKGFPSFPLVERQANEVDWWDMVCNVKKLINEKKEDGKVFWQNLAGYKRQEALRPYLSSEEDRKKGKKFARYQLGDLLLHLEKKHGEDWGKVYDEAWERIDKKVEGLSKHIKLEEERRSEDAQSKAALTDWLRAKASFVIEGLKEADKDEFCRCELKLQKWYGDLRGKPFAIEAENSILDISGFSKQYNCAFIWQKDGVKKLNLYLIINYFKGGKLRFKKIKPEAFEANRFYTVINKKSGEIVPMEVNFNFDDPNLIILPLAFGKRQGREFIWNDLLSLETGSLKLANGRVIEKTLYNRRTRQDEPALFVALTFERREVLDSSNIKPMNLIGVARGENIPAVIALTDPEGCPLSRFKDSLGNPTHILRIGESYKEKQRTIQAKKEVEQRRAGGYSRKYASKAKNLADDMVRNTARDLLYYAVTQDAMLIFANLSRGFGRQGKRTFMAERQYTRMEDWLTAKLAYEGLSKTYLSKTLAQYTSKTCSNCGFTIHTSADYDRVLEKLKKTATGWMTTINGKELKVEGQITYYNRYKRQNVVKDLSVELDRLSEESVNNDISSWTKGRSGEALSLLKKRFSHRPVQEKFVCLNCGFETHAAEQAALNIARSWLFLRSQEYKKYQTNKTTGNTDKRAFVETWQSFYRKKLKEVWKPAV

SEQ ID NO: 332 - protein, 977 aa, synthetic construct
QEIKRINKIRRRLVKDSNTKKAGKTGPMKTLLVRVMTPDLRERLENLRKKPENIPQPISNTSRANLNKLLTDYTEMKKAILHVYWEEFQKDPVGLMSRVAQPASKKIDQNKLKPEMDEKGNLTTAGFACSQCGQPLFVYKLEQVSEKGKAYTNYFGRCNVAEHEKLILLAQLKPEKDSDEAVTYSLGKFGQRALDFYSIHVTKESTHPVKPLAQIAGNRYASGPVGKALSDACMGTIASFLSKYQDIIIEHQKVVKGNQKRLESLRELAGKENLEYPSVTLPPQPHTKEGVDAYNEVIARVRMWVNHNLWQKLKLSRDDAKPLLRLKGFPSFPLVERQANEVDWWDMVCNVKKLINEKKEDGKVFWQNLAGYKRQEALRPYLSSEEDRKKGKKFARYQLGDLLLHLEKKHGEDWGKVYDEAWERIDKKVEGLSKHIKLEEERRSEDAQSKAALTDWLRAKASFVIEGLKEADKDEFCRCELKLQKWYGDLRGKPFAIEAENSILDISGFSKQYNCAFIWQKDGVKKLNLYLIINYFKGGKLRFKKIKPEAFEANRFYTVINKKSGEIVPMEVNFNFDDPNLIILPLAFGKRQGREFIWNDLLSLETGSLKLANGRVIEKTLYNRRTRQDEPALFVALTFERREVLDSSNIKPMNLIGVARGENIPAVIALTDPEGCPLSRFKDSLGNPTHILRIGESYKEKQRTIQAKKEVEQRRAGGYSRKYASKAKNLADDMVRNTARDLLYYAVTQDAMLIFANLSRGFGRQGKRTFMAERQYTRMEDWLTAKLAYEGLSKTYLSKTLAQYTSKTCSNCGFTITSADYDRVLEKLKKTATGWMTTINGKELKVEGQITYYNRYKRQNVVKDLSVELDRLSEESVNNDISSWTKGRSGEALSLLKKRFSHRPVQEKFVCLNCGFETHAAEQAALNIARSWLFLRSQEYKKYQTNKTTGNTDKRAFVETWQSFYRKKLKEVWKPAV

SEQ ID NO: 333 - protein, 978 aa, synthetic construct
QEIKRINKIRRRLVKDSNTKKAGKTGPMKTLLVRVMTPDLRERLENLRKKPENIPQPISNTSRANLNKLLTDYTEMKKAILHVYWEEFQKDPVGLMSRVAQPASKKIDQNKLKPEMDEKGNLTTAGFACSQCGQPLFVYKLEQVSEKGKAYTNYFGRCNVAEHEKLILLAQLKPEKDSDEAVTYSLGKFGQRALDFYSIHVTKESTHPVKPLAQIAGNRYASGAPVGKALSDACMGTIASFLSKYQDIIIEHQKVVKGNQKRLESLRELAGKENLEYPSVTLPPQPHTKEGVDAYNEVIARVRMWVNLNLWQKLKLSRDDAKPLLRLKGFPSFPLVERQANEVDWWDMVCNVKKLINEKKEDGKVFWQNLAGYKRQEALRPYLSSEEDRKKGKKFARYQLGDLLLHLEKKHGEDWGKVYDEAWERIDKKVEGLSKHIKLEEERRSEDAQSKAALTDWLRAKASFVIEGLKEADKDEFCRCELKLQKWYGDLRGKPFAIEAENSILDISGFSKQYNCAFIWQKDGVKKLNLYLIINYFKGGKLRFKKIKPEAFEANRFYTVINKKSGEIVPMEVNFNFDDPNLIILPLAFGKRQGREFIWNDLLSLETGSLKLANGRVIEKTLYNRRTRQDEPALFVALTFERREVLDSSNIKPMNLIGVARGENIPAVIALTDPEGCPLSRFKDSLGNPTHILRIGESYKEKQRTIQAKKEVEQRRAGGYSRKYASKAKNLADDMVRNTARDLLYYAVTQDAMLIFANLSRGFGRQGKRTFMAERQYTRMEDWLTAKLAYEGLSKTYLSKTLAQYTSKTCSNCGFTITSADYDRVLEKLKKTATGWMTTINGKELKVEGQITYYNRYKRQNVVKDLSVELDRLSEESVNNDISSWTKGRSGEALSLLKKRFSHRPVQEKFVCLNCGFETHAAEQAALNIARSWLFLRSQEYKKYQTNKTTGNTDKRAFVETWQSFYRKKLKEVWKPAV

SEQ ID NO: 334 - protein, 979 aa, synthetic construct
RQEIKRINKIRRRLVKDSNTKKAGKTGPMKTLLVRVMTPDLRERLENLRKKPENIPQPISNTSRANLNKLLTDYTEMKKAILHVYWEEFQKDPVGLMSRVAQPASKKIDQNKLKPEMDEKGNLTTAGFACSQCGQPLFVYKLEQVSEKGKAYTNYFGRCNVAEHEKLILLAQLKPEKDSDEAVTYSLGKFGQRALDFYSIHVTKESTHPVKPLAQIAGNRYASGAPVGKALSDACMGTIASFLSKYQDIIIEHQKVVKGNQKRLESLRELAGKENLEYPSVTLPPQPHTKEGVDAYNEVIARVRMWVNLNLWQKLKLSRDDAKPLLRLKGFPSFPLVERQANEVDWWDMVCNVKKLINEKKEDGKVFWQNLAGYKRQEALRPYLSSEEDRKKGKKFARYQLGDLLLHLEKKHGEDWGKVYDEAWERIDKKVEGLSKHIKLEEERRSEDAQSKAALTDWLRAKASFVIEGLKEADKDEFCRCELKLQKWYGDLRGKPFAIEAENSILDISGFSKQYNCAFIWQKDGVKKLNLYLIINYFKGGKLRFKKIKPEAFEANRFYTVINKKSGEIVPMEVNFNFDDPNLIILPLAFGKRQGREFIWNDLLSLETGSLKLANGRVIEKTLYNRRTRQDEPALFVALTFERREVLDSSNIKPMNLIGVARGENIPAVIALTDPEGCPLSRFKDSLGNPTHILRIGESYKEKQRTIQAKKEVEQRRAGGYSRKYASKAKNLADDMVRNTARDLLYYAVTQDAMLIFANLSRGFGRQGKRTFMAERQYTRMEDWLTAKLAYEGLSKTYLSKTLAQYTSKTCSNCGFTITSADYDRVLEKLKKTATGWMTTINGKELKVEGQITYYNRYKRQNVVKDLSVELDRLSEESVNNDISSWTKGRSGEALSLLKKRFSHRPVQEKFVCLNCGFETHAAEQAALNIARSWLFLRSQEYKKYQTNKTTGNTDKRAFVETWQSFYRKKLKEVWKPAV

SEQ ID NO: 335 - protein, 978 aa, synthetic construct
QEIKRINKIRRRLVKDSNTKKAGKTGPMKTLLVRVMTPDLRERLENLRKKPENIPQPISNTSRANLNKLLTDYTEMKKAILHVYWEEFQKDPVGLMSRVAQPASKKIDQNKLKPEMDEKGNLTTAGFACSQCGQPLFVYKLEQVSEKGKAYTNYFGRCNVAEHEKLILLAQLKPEKDSDEAVTYSLGKFGQRALDFYSIHVTKESTHPVKPLAQIAGNRYASGPVGKALSDACMGTIASFLSKYQDIIIEHQKVVKGNQKRLESLRELAGKENLEYPSVTLPPQPHTKEGVDAYNEVIARVRMWVNLNLWQKLKLSRDDAKPLLRLKGFPSFPLVERQANEVDWWDMVCNVKKLINEKKEDGKVFWQNLAGYKRQEALRPYLSSEEDRKKGKKFARYQLGDLLLHLEKKHGEDWGKVYDEAWERIDKKVEGLSKHIKLEEERRSEDAQSKAALTDWLRAKASFVIEGLKEADKDEFCRCELKLQKWYGDLRGKPFAIEAENSILDISGFSKQYNCAFIWQKDGVKKLNLYLIINYFKGGKLRFKKIKPEAFEANRFYTVINKKSGEIVPMEVNFNFDDPNLIILPLAFGKRQGREFIWNDLLSLETGSLKLANGRVIEKTLYNRRTRQDEPALFVALTFERREVLDSSNIKPMNLIGVARGENIPAVIALTDPEGCPLSRFKDSLGNPTHIQLRIGESYKEKQRTIQAKKEVEQRRAGGYSRKYASKAKNLADDMVRNTARDLLYYAVTQDAMLIFANLSRGFGRQGKRTFMAERQYTRMEDWLTAKLAYEGLSKTYLSKTLAQYTSKTCSNCGFTITSADYDRVLEKLKKTATGWMTTINGKELKVEGQITYYNRYKRQNVVKDLSVELDRLSEESVNNDISSWTKGRSGEALSLLKKRFSHRPVQEKFVCLNCGFETHAAEQAALNIARSWLFLRSQEYKKYQTNKTTGNTDKRAFVETWQSFYRKKLKEVWKPAV

SEQ ID NO: 336 - protein, 977 aa, synthetic construct
QEIKRINKIRRRLVKDSNTKKAGKTGPMKTLLVRVMTPDLRERLENLRKKPENIPQPISNTSRANLNKLLTDYTEMKKAILHVYWEEFQKDPVGLMSRVAQPASKKIDQNKLKPEMDEKGNLTTAGFACSQCGQPLFVYKLEQVSEKGKAYTNYFGRCNVAEHEKLILLAQLKPEKDSDEAVTYSLGKFGQRALDFYSIHVTKESTHPVKPLAQIAGNRYASGPVGKALSDACMGTIASFLSKYQDIIIEHQKVVKGNQKRLESLRELAGKENLEYPSVTLPPQPHTKEGVDAYNEVIARVRMWVNLNLWQKLKLSRDDAKPLLRLKGFPSFPLVERQANEVDWWDMVCNVKKLINEKKEDGKVFWQNLAGYKRQEALRPYLSSEEDRKKGKKFARYQLGDLLLHLEKKHGEDWGKVYDEAWERIDKKVEGLSKHIKLEEERRSEDAQSKAALTDWLRAKASFVIEGLKEADKDEFCRCELKLQKWYGDLRGKPFAIEAENSILDISGFSKQYNCAFIWQKDGVKKLNLYLIINYFKGGKLRFKKIKPEAFEANRFYTVINKKSGEIVPMEVNFNFDDPNLIILPLAFGKRQGREFIWNDLLSLETGSLKLANGRVIEKTLYNRRTRQDEPALFVALTFERREVLDSSNIKPMNLIGVARGENIPAVIALTDPEGCPLSRFKDSLGNPTHILRIGESYKEKQRTTQAKKEVEQRRAGGYSRKYASKAKNLADDMVRNTARDLLYYAVTQDAMLIFANLSRGFGRQGKRTFMAERQYTRMEDWLTAKLAYEGLSKTYLSKTLAQYTSKTCSNCGFTITSADYDRVLEKLKKTATGWMTTINGKELKVEGQITYYNRYKRQNVVKDLSVELDRLSEESVNNDISSWTKGRSGEALSLLKKRFSHRPVQEKFVCLNCGFETHAAEQAALNIARSWLFLRSQEYKKYQTNKTTGNTDKRAFVETWQSFYRKKLKEVWKPAV

SEQ ID NO: 337 - protein, 977 aa, synthetic construct
QEIKRINKIRRRLVKDSNTKKAGKTGPMKTLLVRVMTPDLRERLENLRKKPENIPQPISNTSRANLNKLLTDYTEMKKAILHVYWEEFQKDPVGLMSRVAQPASKKIDQNKLKPEMDEKGNLTTAGFACSQCGQPLFVYKLEQVSEKGKAYTNYFGRCNVAEHEKLILLAQLKPEKDSDEAVTYSLGKFGQRALDFYSIHVTKESTHPVKPLAQIAGNRYASGPVGKALSDACMGTIASFLSKYQDIIIEHQKVVKGNQKRLESLRELAGKENLEYPSVTLPPQPHTKEGVDAYNEVIARVRMWVNLNLWQKLKLSRDDAKPLLRLKGFPSFPLVERQANEVDWWDMVCNVKKLINEKKEDGKVFWQNLAGYKRQEALRPYLSSEEDRKKGKKFARYQLGDLLLHLEKKHGEDWGKVYDEAWERIDKKVEGLSKHIKLEEERRSEDAQSKAALTDWLRAKASFVIEGLKEADKDEFCRCELKLQKWYGDLRGKPFAIEAENSILDISGFSKQYNCAFIWQKDGVKKLNLYLIINYFKGGKLRFKKIKPEAFEANRFYTVINKKSGEIVPMEVNFNFDDPNLIILPLAFGKRQGREFIWNDLLSLETGSLKLANGRVIEKTLYNRRTRQDEPALFVALTFERREVLDSSNIKPMNLIGVARGENIPAVIALTDPEGCPLSRFKRSLGNPTHILRIGESYKEKQRTIQAKKEVEQRRAGGYSRKYASKAKNLADDMVRNTARDLLYYAVTQDAMLIFANLSRGFGRQGKRTFMAERQYTRMEDWLTAKLAYEGLSKTYLSKTLAQYTSKTCSNCGFTITSADYDRVLEKLKKTATGWMTTINGKELKVEGQITYYNRYKRQNVVKDLSVELDRLSEESVNNDISSWTKGRSGEALSLLKKRFSHRPVQEKFVCLNCGFETHAAEQAALNIARSWLFLRSQEYKKYQTNKTTGNTDKRAFVETWQSFYRKKLKEVWKPAV

SEQ ID NO: 338 - protein, 977 aa, synthetic construct
QEIKRINKIRRRLVKDSNTKKAGKTYPMKTLLVRVMTPDLRERLENLRKKPENIPQPISNTSRANLNKLLTDYTEMKKAILHVYWEEFQKDPVGLMSRVAQPASKKIDQNKLKPEMDEKGNLTTAGFACSQCGQPLFVYKLEQVSEKGKAYTNYFGRCNVAEHEKLILLAQLKPEKDSDEAVTYSLGKFGQRALDFYSIHVTKESTHPVKPLAQIAGNRYASGPVGKALSDACMGTIASFLSKYQDIIIEHQKVVKGNQKRLESLRELAGKENLEYPSVTLPPQPHTKEGVDAYNEVIARVRMWVNLNLWQKLKLSRDDAKPLLRLKGFPSFPLVERQANEVDWWDMVCNVKKLINEKKEDGKVFWQNLAGYKRQEALRPYLSSEEDRKKGKKFARYQLGDLLLHLEKKHGEDWGKVYDEAWERIDKKVEGLSKHIKLEEERRSEDAQSKAALTDWLRAKASFVIEGLKEADKDEFCRCELKLQKWYGDLRGKPFAIEAENSILDISGFSKQYNCAFIWQKDGVKKLNLYLIINYFKGGKLRFKKIKPEAFEANRFYTVINKKSGEIVPMEVNFNFDDPNLIILPLAFGKRQGREFIWNDLLSLETGSLKLANGRVIEKTLYNRRTRQDEPALFVALTFERREVLDSSNIKPMNLIGVARGENIPAVIALTDPEGCPLSRFKDSLGNPTHILRIGESYKEKQRTIQAKKEVEQRRAGGYSRKYASKAKNLADDMVRNTARDLLYYAVTQDAMLIFANLSRGFGRQGKRTFMAERQYTRMEDWLTAKLAYEGLSKTYLSKTLAQYTSKTCSNCGFTITSADYDRVLEKLKKTATGWMTTINGKELKVEGQITYYNRYKRQNVVKDLSVELDRLSEESVNNDISSWTKGRSGEALSLLKKRFSHRPVQEKFVCLNCGFETHAAEQAALNIARSWLFLRSQEYKKYQTNKTTGNTDKRAFVETWQSFYRKKLKEVWKPAV

SEQ ID NO: 339 - protein, 977 aa, synthetic construct
QEIKRINKIRRRLVKDSNTKKAGKTGPMKTLLVRVMTPDLRERLENLRKKPENIPQPISNTSRANLNKLLTDYTEMKKAILHVYWEEFQKDPVGLMSRVAQPASKKIDQNKLKPEMDEKGNLTTAGFACSQCGQPLFVYKLEQVSEKGKAYTNYFGRCNVAEHEKLILLAQLKPEKDSDEAVTYSLGKFGQRALDFYSIHVTKESTHPVKPLAQIAGNRYASGPVGKALSDACMGTIASFLSKYQDIIIEHQKVVKGNQKRLESLRELAGKENLEYPSVTLPPQPHTKEGVDAYNEVIARVRMWVNLNLWQKLKLSRDDAKPLLRLKGFPSFPLVERQANEVDWWDMVCNVKKLINEKKEDGKVFWQNLAGYKRQEALRPYLSSEEDRKKGKKFARYQLGDLLLHLEKKHGEDWGKVYDEAWERIDKKVEGLSKHIKLEEERRSEDAQSKAALTDWLRAKASFVIEGLKEADKDEFCRCELKLQKWYGDLRGKPFAIEAENSILDISGFSKQYNCAFIWQKDGVKKLNLYLIINYFKGGKLRFKKIKPEAFEANRFYTVINKKSGEIVPMEVNFNFDDPNLIILPLAFGKRQGREFIWNDLLSLETGSLKLANGRVIEKTLYNRRTRQDEPALFVALTFERREVLDSSNIKPMNLIGVARGENIPAVIALTDPEGCPLSRFKDSLGNPTHILRIGESYKEKQRTIQAKKEVEQRRAGGYSRKYASKAKNLADDMVRNTARDLLYYAVTQDAMLIFANLSRGFGRQGKRTFMAERQYTRMEDWLTAKLAYEGLSKTYLSKTLAQYTSKTCSNCGFTIHSADYDRVLEKLKKTATGWMTTINGKELKVEGQITYYNRYKRQNVVKDLSVELDRLSEESVNNDISSWTKGRSGEALSLLKKRFSHRPVQEKFVCLNCGFETHAAEQAALNIARSWLFLRSQEYKKYQTNKTTGNTDKRAFVETWQSFYRKKLKEVWKPAV

SEQ ID NO: 340 - protein, 977 aa, synthetic construct
QEIKRINKIRRRLVKDSNTKKAGKTGPMKTLLVRVMTPDLRERLENLRKKPENIPQPISNTSRANLNKLLTDYTEMKKAILHVYWEEFQKDPVGLMSRVAQPASKKIDQNKLKPEMDEKGNLTTAGFACSQCGQPLFVYKLEQVSEKGKAYTNYFGRCNVAEHEKLILLAQLKPEKDSDEAVTYSLGKFGQRALDFYSIHVTKESTHPVKPLAQIAGNRYASGPVGKALSDACMGTIASFLSKYQDIIIEHQKVVKGNQKRLESLRELAGKENLEYPSVTLPPQPHTKEGVDAYNEVIARVRMWVNLNLWQKLKLSRDDAKPLLRLKGFPSFPLVERQANEVDWWDMVCNVKKLINEKKEDGKVFWQNLAGYKRQEALRPYLSSEEDRKKGKKFARYQLGDLLLHLEKKHGEDWGKVYDEAWERIDKKVEGLSKHIKLEEERRSEDAQSKAALTDWLRAKASFVIEGLKEADKDEFCRCELKLQKWYGDLRGKPFAIEAENSILDISGFSKQYNCAFIWQKDGVKKLNLYLIINYFKGGKLRFKKIKPEAFEANRFYTVINKKSGEIVPMEVNFNFDDPNLIILPLAFGKRQGREFIWNDLLSLETGSLKLANGRVIEKTLYNRRTRQDEPALFVALTFERREVLDSSNIKPMNLIGVARGENIPAVIALTDPEGCPLSRFKDSLGNPTHILRIGESYKEKQRTIQAKKEVEQRRAGGYSRKYASKAKNLADDMVRNTARDLLYYAATQDAMLIFANLSRGFGRQGKRTFMAERQYTRMEDWLTAKLAYEGLSKTYLSKTLAQYTSKTCSNCGFTITSADYDRVLEKLKKTATGWMTTINGKELKVEGQITYYNRYKRQNVVKDLSVELDRLSEESVNNDISSWTKGRSGEALSLLKKRFSHRPVQEKFVCLNCGFETHAAEQAALNIARSWLFLRSQEYKKYQTNKTTGNTDKRAFVETWQSFYRKKLKEVWKPAV

SEQ ID NO: 341 - protein, 977 aa, synthetic construct
QEIKRINKIRRRLVKDSNTKKAGKTGPMKTLLVRVMTPDLRERLENLRKKPENIPQPISNTSRANLNKLLTDYTEMKKAILHVYWEEFQKDPVGLMSRVAQPASKKIDQNKLKPEMDEKGNLTTAGFACSQCGQPLFVYKLEQVSEKGKAYTNYFGRCNVAEHEKLILLAQLKPEKDSDEAVTYSLGKFGQRALDFYSIHVTKESTHPVKPLAQIAGNRYASGPVGKALSDACMGTIASFLSKYQDIIIEHQKVVKGNQKRLESLRELAGKENLEYPSVTLPPQPHTKEGVDAYNEVIARVRMWVNLNLWQKLKLSRDDAKPLLRLKGFPSFPLVERQANEVDWWDMVCNVKKLINEKKEDGKVFWQNLAGYKRQEALRPYLSSEEDRKKGKKFARYQLGDLLLHLEKKHGEDWGKVYDEAWERIDKKVEGLSKHIKLEEERRSEDAQSKAALTDWLRAKASFVIEGLKEADKDEFCRCELKLQKWYGDLRGKPFAIEAENSILDISGFSKQYNCAFIWQKDGVKKLNLYLIINYFKGGKLRFKKIKPEAFEANRFYTVINKKSGEIVPMEVNFNFDDPNLIILPLAFGKRQGREFIWNDLLSLETGSLKLANGRVIEKTLYNRRTRQDEPALFVALTFERREVLDSSNIKPMNLIGVARGENIPAVIALTDPEGCPLSRFKDSLGNPTHILRIGESYKEKQRTIQAAKEVEQRRAGGYSRKYASKAKNLADDMVRNTARDLLYYAVTQDAMLIFANLSRGFGRQGKRTFMAERQYTRMEDWLTAKLAYEGLSKTYLSKTLAQYTSKTCSNCGFTITSADYDRVLEKLKKTATGWMTTINGKELKVEGQITYYNRYKRQNVVKDLSVELDRLSEESVNNDISSWTKGRSGEALSLLKKRFSHRPVQEKFVCLNCGFETHAAEQAALNIARSWLFLRSQEYKKYQTNKTTGNTDKRAFVETWQSFYRKKLKEVWKPAV

SEQ ID NO: 342 - protein, 20 aa, synthetic construct
GLFHALLHLLHSLWHLLLHA

SEQ ID NO: 343 - protein, 9 aa, synthetic construct
HHHHHHHHH

SEQ ID NO: 344 - protein, 7 aa, synthetic construct
PKKKRKV

SEQ ID NO: 345 - protein, 16 aa, synthetic construct
KRPAATKKAGQAKKKK

SEQ ID NO: 346 - protein, 9 aa, synthetic construct
PAAKRVKLD

SEQ ID NO: 347 - protein, 11 aa, synthetic construct
RQRRNELKRSP

SEQ ID NO: 348 - protein, 38 aa, synthetic construct
NQSSNFGPMKGGNFGGRSSGPYGGGGQYFAKPRNQGGY

SEQ ID NO: 349 - protein, 42 aa, synthetic construct
RMRIZFKNKGKDTAELRRRRVEVSVELRKAKKDEQILKRRNV

SEQ ID NO: 350 - protein, 8 aa, synthetic construct
VSRKRPRP

SEQ ID NO: 351 - protein, 8 aa, synthetic construct
PPKKARED

SEQ ID NO: 352 - protein, 8 aa, synthetic construct
PQPKKKPL

SEQ ID NO: 353 - protein, 12 aa, synthetic construct
SALIKKKKKMAP

SEQ ID NO: 354 - protein, 5 aa, synthetic construct
DRLRR

SEQ ID NO: 355 - protein, 7 aa, synthetic construct
PKQKKRK

SEQ ID NO: 356 - protein, 10 aa, synthetic construct
RKLKKKIKKL

SEQ ID NO: 357 - protein, 10 aa, synthetic construct
REKKKFLKRR

SEQ ID NO: 358 - protein, 20 aa, synthetic construct
KRKGDEVDGVDEVAKKKSKK

SEQ ID NO: 359 - protein, 17 aa, synthetic construct
RKCLQAGMNLEARKTKK

SEQ ID NO: 360 - protein, 8 aa, synthetic construct
PRPRKIPR

SEQ ID NO: 361 - protein, 9 aa, synthetic construct
PPRKKRTVV

SEQ ID NO: 362 - protein, 12 aa, synthetic construct
NLSKKKKRKREK

SEQ ID NO: 363 - protein, 10 aa, synthetic construct
RRPSRPFRKP

SEQ ID NO: 364 - protein, 8 aa, synthetic construct
KRPRSPSS

SEQ ID NO: 365 - protein, 19 aa, synthetic construct
KRGINDRNFWRGENERKTR

SEQ ID NO: 366 - protein, 11 aa, synthetic construct
PRPPKMARYDN

SEQ ID NO: 367 - protein, 8 aa, synthetic construct
KRSFSKAF

SEQ ID NO: 368 - protein, 9 aa, synthetic construct
KLKIKRPVK

SEQ ID NO: 369 - protein, 19 aa, synthetic construct
PKKKRKVPPPPAAKRVKLD

SEQ ID NO: 370 - protein, 17 aa, synthetic construct
PKTRRRPRRSQRKRPPT

SEQ ID NO: 371 - protein, 24 aa, synthetic construct
SRRRKANPTKLSENAKKLAKEVEN

SEQ ID NO: 372 - protein, 16 aa, synthetic construct
KTRRRPRRSQRKRPPT

SEQ ID NO: 373 - protein, 13 aa, synthetic construct
RRKKRRPRRKKRR

SEQ ID NO: 374 - protein, 14 aa, synthetic construct
PKKKSRKPKKKSRK

SEQ ID NO: 375 - protein, 17 aa, synthetic construct
HKKKHPDASVNFSEFSK

SEQ ID NO: 376 - protein, 18 aa, synthetic construct
QRPGPYDRPQRPGPYDRP

SEQ ID NO: 377 - protein, 16 aa, synthetic construct
LSPSLSPLLSPSLSPL

SEQ ID NO: 378 - protein, 18 aa, synthetic construct
RGKGGKGLGKGGAKRHRK

SEQ ID NO: 379 - protein, 14 aa, synthetic construct
PKRGRGRPKRGRGR

SEQ ID NO: 380 - protein, 19 aa, synthetic construct
PKKKRKVPPPPAAKRVKLD

SEQ ID NO: 381 - protein, 17 aa, synthetic construct
PKKKRKVPPPPKKKRKV

SEQ ID NO: 382 - protein, 11 aa, synthetic construct
PAKRARRGYKC

SEQ ID NO: 383 - protein, 11 aa, synthetic construct
KLGPRKATGRW

SEQ ID NO: 384 - protein, 7 aa, synthetic construct
PRRKREE

SEQ ID NO: 385 - protein, 7 aa, synthetic construct
PYRGRKE

SEQ ID NO: 386 - protein, 8 aa, synthetic construct
PLRKRPRR

SEQ ID NO: 387 - protein, 18 aa, synthetic construct
PLRKRPRRGSPLRKRPRR

SEQ ID NO: 388 - protein, 29 aa, synthetic construct
PAAKRVKLDGGKRTADGSEFESPKKKRKV

SEQ ID NO: 389 - protein, 37 aa, synthetic construct
PAAKRVKLDGGKRTADGSEFESPKKKRKVGIHGVPAA

SEQ ID NO: 390 - protein, 46 aa, synthetic construct
PAAKRVKLDGGKRTADGSEFESPKKKRKVAEAAAKEAAAKEAAAKA

SEQ ID NO: 391 - protein, 31 aa, synthetic construct
PAAKRVKLDGGKRTADGSEFESPKKKRKVPG

SEQ ID NO: 392 - protein, 15 aa, synthetic construct
KRKGSPERGERKRHW

SEQ ID NO: 393 - protein, 28 aa, synthetic construct
KRTADSQHSTPPKTKRKVEFEPKKKRKV

SEQ ID NO: 394 - protein, 38 aa, synthetic construct
PKKKRKVGGSKRTADSQHSTPPKTKRKVEFEPKKKRKV

SEQ ID NO: 395 - protein, 5 aa, synthetic construct
  VARIANT 2..5: note = individual amino acid residues may be present or absent
GGGGG

SEQ ID NO: 396 - protein, 10 aa, synthetic construct
  VARIANT 3..4: note = grouped amino acid residues may be present or absent
  VARIANT 5..6: note = grouped amino acid residues may be present or absent
  VARIANT 7..8: note = grouped amino acid residues may be present or absent
  VARIANT 9..10: note = grouped amino acid residues may be present or absent
GSGSGSGSGS

SEQ ID NO: 397 - protein, 25 aa, synthetic construct
  VARIANT 6..10: note = grouped amino acid residues may be present or absent
  VARIANT 11..15: note = grouped amino acid residues may be present or absent
  VARIANT 16..20: note = grouped amino acid residues may be present or absent
  VARIANT 21..25: note = grouped amino acid residues may be present or absent
GSGGSGSGGSGSGGSGSGGSGSGGS

SEQ ID NO: 398 - protein, 30 aa, synthetic construct
  VARIANT 7..12: note = grouped amino acid residues may be present or absent
  VARIANT 13..18: note = grouped amino acid residues may be present or absent
  VARIANT 19..24: note = grouped amino acid residues may be present or absent
  VARIANT 25..30: note = grouped amino acid residues may be present or absent
GGSGGSGGSGGSGGSGGSGGSGGSGGSGGS

SEQ ID NO: 399 - protein, 20 aa, synthetic construct
  VARIANT 5..8: note = grouped amino acid residues may be present or absent
  VARIANT 9..12: note = grouped amino acid residues may be present or absent
  VARIANT 13..16: note = grouped amino acid residues may be present or absent
  VARIANT 17..20: note = grouped amino acid residues may be present or absent
GGGSGGGSGGGSGGGSGGGS

SEQ ID NO: 400 - protein, 4 aa, synthetic construct
GGSG

SEQ ID NO: 401 - protein, 5 aa, synthetic construct
GGSGG

SEQ ID NO: 402 - protein, 5 aa, synthetic construct
GSGSG

SEQ ID NO: 403 - protein, 5 aa, synthetic construct
GSGGG

SEQ ID NO: 404 - protein, 5 aa, synthetic construct
GGGSG

SEQ ID NO: 405 - protein, 5 aa, synthetic construct
GSSSG

SEQ ID NO: 406 - protein, 4 aa, synthetic construct
GPGP

SEQ ID NO: 407 - protein, 6 aa, synthetic construct
PPAPPA

SEQ ID NO: 408 - protein, 4 aa, synthetic construct
PPPG

SEQ ID NO: 409 - protein, 7 aa, synthetic construct
PPPGPPP

SEQ ID NO: 410 - protein, 23 aa, synthetic construct
  VARIANT 8..11: note = grouped amino acid residues may be present or absent
  VARIANT 12..15: note = grouped amino acid residues may be present or absent
  VARIANT 16..19: note = grouped amino acid residues may be present or absent
  VARIANT 20..23: note = grouped amino acid residues may be present or absent
PPPGGGSGGGSGGGSGGGSGGGS

SEQ ID NO: 411 - protein, 23 aa, synthetic construct
  VARIANT 1..4: note = grouped amino acid residues may be present or absent
  VARIANT 5..8: note = grouped amino acid residues may be present or absent
  VARIANT 9..12: note = grouped amino acid residues may be present or absent
  VARIANT 13..16: note = grouped amino acid residues may be present or absent
GGGSGGGSGGGSGGGSGGGSPPP

SEQ ID NO: 412 - protein, 17 aa, synthetic construct
AEAAAKEAAAKEAAAKA

SEQ ID NO: 413 - protein, 12 aa, synthetic construct
TPPKTKRKVEFE

SEQ ID NO: 414 - protein, 11 aa, synthetic construct
YGRKKRRQRRR

SEQ ID NO: 415 - protein, 8 aa, synthetic construct
RKKRRQRR

SEQ ID NO: 416 - protein, 11 aa, synthetic construct
YARAAARQARA

SEQ ID NO: 417 - protein, 11 aa, synthetic construct
THRLPRRRRRR

SEQ ID NO: 418 - protein, 11 aa, synthetic construct
GGRRARRRRRR

SEQ ID NO: 419 - protein, 50 aa, synthetic construct
  VARIANT 4..50: note = individual amino acid residues may be present or absent
RRRRRRRRRRRRRRRRRRRRRRRRRRRRRRRRRRRRRRRRRRRRRRRRRR

SEQ ID NO: 420 - protein, 27 aa, synthetic construct
GWTLNSAGYLLGKINLKALAALAKKIL

SEQ ID NO: 421 - protein, 33 aa, synthetic construct
KALAWEAKLAKALAKALAKHLAKALAKALKCEA

SEQ ID NO: 422 - protein, 16 aa, synthetic construct
RQIKIWFQNRRMKWKK

SEQ ID NO: 423 - DNA, 130 bp, synthetic construct
  source 1..130: mol_type = other DNA
cctgcaggcagctgcgcgctcgctcgctcactgaggccgcccgggcgtcgggcgacctttggtcgcccggcctcagtgagcgagcgagcgcgcagagagggagtggccaactccatcactaggggttcct

SEQ ID NO: 424 - DNA, 141 bp, synthetic construct
  source 1..141: mol_type = other DNA
aggaacccctagtgatggagttggccactccctctctgcgcgctcgctcgctcactgaggccgggcgaccaaaggtcgcccgacgcccgggctttgcccgggcggcctcagtgagcgagcgagcgcgcagctgcctgcagg

SEQ ID NO: 425 - DNA, 537 bp, synthetic construct
  source 1..537: mol_type = other DNA
cctcatggagctcctcctgtcagaggagtgtggggactggatgactccagaggtaacttgtgggggaacgaacaggtaaggggctgtgtgacgagatgagagactgggagaataaaccagaaagtctctagctgtccagaggacatagcacagaggcccatggtccctatttcaaacccaggccaccagactgagctgggaccttgggacagacaagtcatgcagaagttaggggaccttctcctcccttttcctggatcctgagtacctctcctccctgacctcaggcttcctcctagtgtcaccttggcccctcttagaagccaattaggccctcagtttctgcagcggggattaatatgattatgaacacccccaatctcccagatgctgattcagccaggagcttaggagggggaggtcactttataagggtctgggggggtcagaacccagagtcatccagctggagccctgagtggctgagctcaggccttcgcagcattcttgggtgggagcagccacgggtcagccaca

SEQ ID NO: 426 - DNA, 714 bp, synthetic construct
  source 1..714: mol_type = other DNA
cctcatggagctcctcctgtcagaggagtgtggggactggatgactccagaggtaacttgtgggggaacgaacaggtaaggggctgtgtgacgagatgagagactgggagaataaaccagaaagtctctagctgtccagaggacatagcacagaggcccatggtccctatttcaaacccaggccaccagactgagctgggaccttgggacagacaagtcatgcagaagttaggggaccttctcctcccttttcctggatcctgagtacctctcctccctgacctcaggcttcctcctagtgtcaccttggcccctcttagaagccaattaggccctcagtttctgcagcggggattaatatgattatgaacacccccaatctcccagatgctgattcagccaggagcttaggagggggaggtcactttataagggtctgggggggtcagaacccagagtcatccagctggagccctgagtggctgagctcaggccttcgcagcattcttgggtgggagcagccacgggtcagccacatcgaggaactgaaaaaccagaaagttaactggtaagtttagtctttttgtcttttatttcaggtcccggatccggtggtggtgcaaatcaaagaactgctcctcagtggatgttgcctttacttctaggcctgtacggaagtgttacttctgctctaaaagctgcggaattgtaccc

SEQ ID NO: 427 - DNA, 815 bp, synthetic construct
  source 1..815: mol_type = other DNA
cctcatggagctcctcctgtcagaggagtgtggggactggatgactccagaggtaacttgtgggggaacgaacaggtaaggggctgtgtgacgagatgagagactgggagaataaaccagaaagtctctagctgtccagaggacatagcacagaggcccatggtccctatttcaaacccaggccaccagactgagctgggaccttgggacagacaagtcatgcagaagttaggggaccttctcctcccttttcctggatcctgagtacctctcctccctgacctcaggcttcctcctagtgtcaccttggcccctcttagaagccaattaggccctcagtttctgcagcggggattaatatgattatgaacacccccaatctcccagatgctgattcagccaggagcttaggagggggaggtcactttataagggtctgggggggtcagaacccagagtcatccagctggagccctgagtggctgagctcaggccttcgcagcattcttgggtgggagcagccacgggtcagccacatcgaggtgagccccacgttctgcttcactctccccatctcccccccctccccacccccaattttgtatttatttattttttaattattttgtgcagcgatgggggcggggggggggggggggcgcgcgccaggcggggcggggcggggcgaggggcggggcggggcgaggcggagaggtgcggcggcagccaatcagagcggcgcgctccgaaagtttccttttatggcgaggcggcggcggcggcggccctataaaaagcgaagcgcgcggcgggcg

SEQ ID NO: 428 - DNA, 271 bp, synthetic construct
  source 1..271: mol_type = other DNA
tctaatcggattccaagcagctcaggggattgtctttttctagcaccttcttgccactcctaagcgtcctccgtgaccccggctgggatttagatcgaggaactgaaaaaccagaaagttaactggtaagtttagtctttttgtcttttatttcaggtcccggatccggtggtggtgcaaatcaaagaactgctcctcagtggatgttgcctttacttctaggcctgtacggaagtgttacttctgctctaaaagctgcggaattgtaccc

SEQ ID NO: 429 - DNA, 426 bp, synthetic construct
  source 1..426: mol_type = other DNA
ataggcgccaagagcctagacttccttaagcgccagagtccacaagggcccagttaatcctcaacattcaaatgctgcccacaaaaccagcccctctgtgccctagccgcctcttttttccaagtgacagtagaactccaccaatccgcagctgaatggggtccgcctcttttccctgcctaaacagacaggaactcctgccaattgagggcgtcaccgctaaggctccgccccagcctgggctccacaaccaatgaagggtaatctcgacaaagagcaaggggtggggcgcgggcgcgcaggtgcagcagcacacaggctggtcgggagggcggggcgcgacgtctgccgtgcggggtcccggcatcggttgcgcgcgcgctccctcctctcggagagagggctgtggtaaaacccgtccggaaa

SEQ ID NO: 430 - DNA, 426 bp, synthetic construct; identical to SEQ ID NO: 429
  source 1..426: mol_type = other DNA

SEQ ID NO: 431 - DNA, 229 bp, synthetic construct
  source 1..229: mol_type = other DNA
agctgaatggggtccgcctcttttccctgcctaaacagacaggaactcctgccaattgagggcgtcaccgctaaggctccgccccagcctgggctccacaaccaatgaagggtaatctcgacaaagagcaaggggtggggcgcgggcgcgcaggtgcagcagcacacaggctggtcgggagggcggggcgcgacgtctgccgtgcggggtcccggcatcggttgcgcgc

SEQ ID NO: 432 - RNA, 137 nt, synthetic construct
  source 1..137: mol_type = other RNA
agaaggctaaagaaggtatattgctgttgacagtgagcgacgctgatcatcaattacttactgtgaagccacagatgggtaagtaattgatgatcagcgctgcctactgcctcggacttcaaggggctactttagga

SEQ ID NO: 433 - RNA, 137 nt, synthetic construct
  source 1..137: mol_type = other RNA
agaaggctaaagaaggtatattgctgttgacagtgagcgacgcaactgcgccttcatttactgtgaagccacagatgggtaaatgaaggcgcagttgcgctgcctactgcctcggacttcaaggggctactttagga

SEQ ID NO: 434 - RNA, 137 nt, synthetic construct
  source 1..137: mol_type = other RNA
agaaggctaaagaaggtatattgctgttgacagtgagcgacgctgagcaagcacattaaactgtgaagccacagatgggtttaatgtgcttgctcagcgctgcctactgcctcggacttcaaggggctactttagga

SEQ ID NO: 435 - RNA, 137 nt, synthetic construct
  source 1..137: mol_type = other RNA
agaaggctaaagaaggtatattgctgttgacagtgagcgacgcctgatcatcaattactactgtgaagccacagatgggtagtaattgatgatcaggcgctgcctactgcctcggacttcaaggggctactttagga

SEQ ID NO: 436 - RNA, 137 nt, synthetic construct
  source 1..137: mol_type = other RNA
agaaggctaaagaaggtatattgctgttgacagtgagcgacggtacctgatcatcaattactgtgaagccacagatgggtaattgatgatcaggtaccgctgcctactgcctcggacttcaaggggctactttagga

SEQ ID NO: 437 - RNA, 137 nt, synthetic construct
  source 1..137: mol_type = other RNA
agaaggctaaagaaggtatattgctgttgacagtgagcgacgttcatttggcagaaagaactgtgaagccacagatgggttctttctgccaaatgaacgctgcctactgcctcggacttcaaggggctactttagga

SEQ ID NO: 438 - RNA, 137 nt, synthetic construct
  source 1..137: mol_type = other RNA
agaaggctaaagaaggtatattgctgttgacagtgagcgacgcatcaattacttcaaagactgtgaagccacagatgggtctttgaagtaattgatgcgctgcctactgcctcggacttcaaggggctactttagga

SEQ ID NO: 439 - RNA, 137 nt, synthetic construct
  source 1..137: mol_type = other RNA
agaaggctaaagaaggtatattgctgttgacagtgagcgacgtacctgatcatcaattaactgtgaagccacagatgggttaattgatgatcaggtacgctgcctactgcctcggacttcaaggggctactttagga

SEQ ID NO: 440 - RNA, 137 nt, synthetic construct
  source 1..137: mol_type = other RNA
agaaggctaaagaaggtatattgctgttgacagtgagcgacgctgatcttcgagaatctactgtgaagccacagatgggtagattctcgaagatcagcgctgcctactgcctcggacttcaaggggctactttagga

SEQ ID NO: 441 - RNA, 137 nt, synthetic construct
  source 1..137: mol_type = other RNA
agaaggctaaagaaggtatattgctgttgacagtgagcgacggaagaagggcaagaagtactgtgaagccacagatgggtacttcttgcccttcttccgctgcctactgcctcggacttcaaggggctactttagga

SEQ ID NO: 442 - RNA, 137 nt, synthetic construct
  source 1..137: mol_type = other RNA
agaaggctaaagaaggtatattgctgttgacagtgagcgacggatcaacgagaagaaagactgtgaagccacagatgggtctttcttctcgttgatccgctgcctactgcctcggacttcaaggggctactttagga

SEQ ID NO: 443 - RNA, 137 nt, synthetic construct
  source 1..137: mol_type = other RNA
agaaggctaaagaaggtatattgctgttgacagtgagcgacggaagagttccagaaagaactgtgaagccacagatgggttctttctggaactcttccgctgcctactgcctcggacttcaaggggctactttagga

SEQ ID NO: 444 - DNA, 137 bp, synthetic construct
  source 1..137: mol_type = other DNA
agaaggctaaagaaggtatattgctgttgacagtgagcgacgctgatcatcaattacttactgtgaagccacagatgggtaagtaattgatgatcagcgctgcctactgcctcggacttcaaggggctactttagga

SEQ ID NO: 445 - DNA, 137 bp, synthetic construct
  source 1..137: mol_type = other DNA
agaaggctaaagaaggtatattgctgttgacagtgagcgacgcaactgcgccttcatttactgtgaagccacagatgggtaaatgaaggcgcagttgcgctgcctactgcctcggacttcaaggggctactttagga

SEQ ID NO: 446 - DNA, 137 bp, synthetic construct
  source 1..137: mol_type = other DNA
agaaggctaaagaaggtatattgctgttgacagtgagcgacgctgagcaagcacattaaactgtgaagccacagatgggtttaatgtgcttgctcagcgctgcctactgcctcggacttcaaggggctactttagga

SEQ ID NO: 447 - DNA, 137 bp, synthetic construct
  source 1..137: mol_type = other DNA
agaaggctaaagaaggtatattgctgttgacagtgagcgacgcctgatcatcaattactactgtgaagccacagatgggtagtaattgatgatcaggcgctgcctactgcctcggacttcaaggggctactttagga

SEQ ID NO: 448 - DNA, 137 bp, synthetic construct
  source 1..137: mol_type = other DNA
agaaggctaaagaaggtatattgctgttgacagtgagcgacggtacctgatcatcaattactgtgaagccacagatgggtaattgatgatcaggtaccgctgcctactgcctcggacttcaaggggctactttagga

SEQ ID NO: 449 - DNA, 137 bp, synthetic construct
  source 1..137: mol_type = other DNA
agaaggctaaagaaggtatattgctgttgacagtgagcgacgttcatttggcagaaagaactgtgaagccacagatgggttctttctgccaaatgaacgctgcctactgcctcggacttcaaggggctactttagga

SEQ ID NO: 450 - DNA, 137 bp, synthetic construct
  source 1..137: mol_type = other DNA
agaaggctaaagaaggtatattgctgttgacagtgagcgacgcatcaattacttcaaagactgtgaagccacagatgggtctttgaagtaattgatgcgctgcctactgcctcggacttcaaggggctactttagga

SEQ ID NO: 451 - DNA, 137 bp, synthetic construct
  source 1..137: mol_type = other DNA
agaaggctaaagaaggtatattgctgttgacagtgagcgacgtacctgatcatcaattaactgtgaagccacagatgggttaattgatgatcaggtacgctgcctactgcctcggacttcaaggggctactttagga

SEQ ID NO: 452 - DNA, 137 bp, synthetic construct
  source 1..137: mol_type = other DNA
agaaggctaaagaaggtatattgctgttgacagtgagcgacgctgatcttcgagaatctactgtgaagccacagatgggtagattctcgaagatcagcgctgcctactgcctcggacttcaaggggctactttagga

SEQ ID NO: 453 - DNA, 137 bp, synthetic construct
  source 1..137: mol_type = other DNA
agaaggctaaagaaggtatattgctgttgacagtgagcgacggaagaagggcaagaagtactgtgaagccacagatgggtacttcttgcccttcttccgctgcctactgcctcggacttcaaggggctactttagga

SEQ ID NO: 454 - DNA, 137 bp, synthetic construct
  source 1..137: mol_type = other DNA
agaaggctaaagaaggtatattgctgttgacagtgagcgacggatcaacgagaagaaagactgtgaagccacagatgggtctttcttctcgttgatccgctgcctactgcctcggacttcaaggggctactttagga

SEQ ID NO: 455 - DNA, 137 bp, synthetic construct
  source 1..137: mol_type = other DNA
agaaggctaaagaaggtatattgctgttgacagtgagcgacggaagagttccagaaagaactgtgaagccacagatgggttctttctggaactcttccgctgcctactgcctcggacttcaaggggctactttagga

SEQ ID NO: 456 - DNA, 29 bp, synthetic construct
  source 1..29: mol_type = other DNA
catctacgtattagtcatcgctattacca

SEQ ID NO: 457 - DNA, 21 bp, synthetic construct
  source 1..21: mol_type = other DNA
gaaatccccgtgagtcaaacc

SEQ ID NO: 458 - DNA, 17 bp, synthetic construct
  source 1..17: mol_type = other DNA
tcaatgggcgtggatag

SEQ ID NO: 459 - DNA, 21 bp, synthetic construct
  source 1..21: mol_type = other DNA
ggaacccctagtgatggagtt

SEQ ID NO: 460 - DNA, 16 bp, synthetic construct
  source 1..16: mol_type = other DNA
cggcctcagtgagcga

SEQ ID NO: 461 - DNA, 21 bp, synthetic construct
  source 1..21: mol_type = other DNA
cactccctctctgcgcgctcg

SEQ ID NO: 462 - DNA, 20 bp, synthetic construct
  source 1..20: mol_type = other DNA
ctgcattctagttgtggttt

SEQ ID NO: 463 - DNA, 584 bp, synthetic construct
  source 1..584: mol_type = other DNA
gacattgattattgactagttattaatagtaatcaattacggggtcattagttcatagcccatatatggagttccgcgttacataacttacggtaaatggcccgcctggctgaccgcccaacgacccccgcccattgacgtcaataatgacgtatgttcccatagtaacgccaatagggactttccattgacgtcaatgggtggagtatttacggtaaactgcccacttggcagtacatcaagtgtatcatatgccaagtacgccccctattgacgtcaatgacggtaaatggcccgcctggcattatgcccagtacatgaccttatgggactttcctacttggcagtacatctacgtattagtcatcgctattaccatggtgatgcggttttggcagtacatcaatgggcgtggatagcggtttgactcacggggatttccaagtctccaccccattgacgtcaatgggagtttgttttggcaccaaaatcaacgggactttccaaaatgtcgtaacaactccgccccattgacgcaaatgggcggtaggcgtgtacggtgggaggtctatataagcagagct

SEQ ID NO: 464 - DNA, 400 bp, synthetic construct
  source 1..400: mol_type = other DNA
ggcctccgcgccgggttttggcgcctcccgcgggcgcccccctcctcacggcgagcgctgccacgtcagacgaagggcgcagcgagcgtcctgatccttccgcccggacgctcaggacagcggcccgctgctcataagactcggccttagaaccccagtatcagcagaaggacattttaggacgggacttgggtgactctagggcactggttttctttccagagagcggaacaggcgaggaaaagtagtcccttctcggcgattctgcggagggatctccgtggggcggtgaacgccgatgattatataaggacgcgccgggtgtggcacagctagttccgtcgcagccgggatttgggtcgcggttcttgtttgtggatcgctgtgatcgtcacttggt

SEQ ID NO: 465 - DNA, 234 bp, synthetic construct
  source 1..234: mol_type = other DNA
tggctccggtgcccgtcagtgggcagagcgcacatcgcccacagtccccgagaagttggggggaggggtcggcaattgaaccggtgcctagagaaggtggcgcggggtaaactgggaaagtgatgtcgtgtactggctccgcctttttcccgagggtgggggagaaccgtatataagtgcagtagtcgccgtgaacgttctttttcgcaacgggtttgccgccagaacacaggt

SEQ ID NO: 466 - DNA, 335 bp, synthetic construct
  source 1..335: mol_type = other DNA
cgttacataacttacggtaaatggcccgcctggctgaccgcccaacgacccccgcccattgacgtcaataatgacgtatgttcccatagtaacgccaatagggactttccattgacgtcaatgggtggagtatttacggtaaactgcccacttggcagtacatcaagtgtatcatatgccaagtacgccccctattgacgtcaatgacggtaaatggcccgcctggcattatgcccagtacatgaccttatgggactttcctacttggcagtacatctacgtattagtcatcgctattaccatgagagggtatataatggaagctcgacttccag

SEQ ID NO: 467 - DNA, 100 bp, synthetic construct
  source 1..100: mol_type = other DNA
ccaaaatcaacgggactttccaaaatgtcgtaataaccccgccccgttgacgcaaatgggcggtaggcgtgtacggtgggaggtctatataagcagagct

SEQ ID NO: 468 - DNA, 52 bp, synthetic construct
  source 1..52: mol_type = other DNA
gacgcaaatgggcggtaggcgtgtacggtgggaggtctatataagcagagct

SEQ ID NO: 469 - DNA, 39 bp, synthetic construct
  source 1..39: mol_type = other DNA
ggtaggcgtgtacggtgggaggtctatataagcagagct

SEQ ID NO: 470 - DNA, 146 bp, synthetic construct
  source 1..146: mol_type = other DNA
atgacacaaaccccgcccagcgtcttgtcattggcgaattcgaacacgcagatgcagtcggggcggcgcggtcccaggtccacttcgcatattaaggtgacgcgtgtggcctcgaacaccgagcgaccctgcagcgacccgcttaa

SEQ ID NO: 471 - DNA, 63 bp, synthetic construct
  source 1..63: mol_type = other DNA
ttcgcatattaaggtgacgcgtgtggcctcgaacaccgagcgaccctgcagcgacccgcttaa

SEQ ID NO: 472 - DNA, 114 bp, synthetic construct
  source 1..114: mol_type = other DNA
cattttgacacccccataatatttttccagaattaacagtataaattgcatctcttgttcaagagttccctatcactctctttaatcactactcacagtaacctcaactcctgc

SEQ ID NO: 473 - DNA, 703 bp, synthetic construct
  source 1..703: mol_type = other DNA
actagtttcatcaccaccgccacccccccgcccccccgccatctgaaagggttctaggggatttgcaacctctctcgtgtgtttcttctttccgagaagcgccgccacacgagaaagctggccgcgaaagtcgtgctggaatcacttccaacgaaaccccaggcatagatgggaaagggtgaagaacacgttgccatggctaccgtttccccggtcacggaataaacgctctctaggatccggaagtagttccgccgcgacctctctaaaaggatggatgtgttctctgcttacattcattggacgttttcccttagaggccaaggccgcccaggcaaaggggcggtcccacgcgtgaggggcccgcggagccatttgattggagaaaagctgcaaaccctgaccaatcggaaggagccacgcttcgggcatcggtcaccgcacctggacagctccgattggtggacttccgccccccctcacgaatcctcattgggtgccgtgggtgcgtggtgcggcgcgattggtgggttcatgtttcccgtcccccgcccgcgagaagtgggggtgaaaagcggcccgacctgcttggggtgtagtgggcggaccgcgcggctggaggtgtgaggatccgaacccaggggtggggggtggaggcggctcctgcgatcgaaggggacttgagactcaccggccgcacgtc

SEQ ID NO: 474 - DNA, 81 bp, synthetic construct
  source 1..81: mol_type = other DNA
gtacttatataagggggtgggggcgcgttcgtcctcagtcgcgatcgaacactcgagccgagcagacgtgcctacggaccg

SEQ ID NO: 475 - DNA, 81 bp, synthetic construct
  source 1..81: mol_type = other DNA
aggtctatataagcagagctcgtttagtgaaccgtcagatcgcctggagacgtcgagccgagtggttgtgcctccatagaa

SEQ ID NO: 476 - DNA, 81 bp, synthetic construct
  source 1..81: mol_type = other DNA
aggtctatataagcagagctcgtttagtgaaccgtcagtccgcctggagacctgcagccgagtggtcgtgcctccatagaa

SEQ ID NO: 477 - DNA, 229 bp, synthetic construct; identical to SEQ ID NO: 431
  source 1..229: mol_type = other DNA

SEQ ID NO: 478 - DNA, 68 bp, synthetic construct
  source 1..68: mol_type = other DNA
ggtaggcgtgtacggtgggaggcctatataagcagagctcgtttagtgaaccgtcagatcgcctggag

SEQ ID NO: 479 - DNA, 65 bp, synthetic construct
  source 1..65: mol_type = other DNA
aggtctatataagcagagctctctggctaactagagaacccactgcttaactggcttatcgaaat

SEQ ID NO: 480 - DNA, 39 bp, synthetic construct; identical to SEQ ID NO: 469
  source 1..39: mol_type = other DNA

SEQ ID NO: 481 - DNA, 81 bp, synthetic construct
  source 1..81: mol_type = other DNA
ggggctataaaagggggtgggggcgcgttcgtcctcactctcttccgcatcgctgtctgcgagggccagctgttggggtga

SEQ ID NO: 482 - DNA, 107 bp, synthetic construct
  source 1..107: mol_type = other DNA
gggggaggagattaggttaaaggtctttgtattaggaggctgtaggcataaattggtctgttcaccagcaccatgcaactttttcacctctgcctaatcatctcatg

SEQ ID NO: 483 - DNA, 227 bp, synthetic construct
  source 1..227: mol_type = other DNA
tgtagtcttatgcaatactcttgtagtcttgcaacatggtaacgatgagttagcaacatgccttacaaggagagaaaaagcaccgtgcatgccgattggtggaagtaaggtggtacgatcgtgccttattaggaaggcaacagacgggtctgacatggattggacgaaccactgaattgccgcattgcagagatattgtatttaagtgcctagctcgatacataaac

SEQ ID NO: 484 - DNA, 448 bp, synthetic construct
  source 1..448: mol_type = other DNA
agtgcaagtgggttttaggaccaggatgaggcggggtgggggtgcctacctgacgaccgaccccgacccactggacaagcacccaacccccattccccaaattgcgcatcccctatcagagagggggaggggaaacaggatgcggcgaggcgcgtgcgcactgccagcttcagcaccgcggacagtgccttcgcccccgcctggcggcgcgcgccaccgccgcctcagcactgaaggcgcgctgacgtcactcgccggtcccccgcaaactccccttcccggccaccttggtcgcgtccgcgccgccgccggcccagccggaccgcaccacgcgaggcgcgagataggggggcacgggcgcgaccatctgcgctgcggcgccggcgactcagcgctgcctcagtctgcggtgggcagcggaggagtcgtgtcgtgcctgagagcgcag

SEQ ID NO: 485 - DNA, 330 bp, synthetic construct
  source 1..330: mol_type = other DNA
gtgtgtcagttagggtgtggaaagtccccaggctccccagcaggcagaagtatgcaaagcatgcatctcaattagtcagcaaccaggtgtggaaagtccccaggctccccagcaggcagaagtatgcaaagcatgcatctcaattagtcagcaaccatagtcccgcccctaactccgcccatcccgcccctaactccgcccagttccgcccattctccgccccatggctgactaattttttttatttatgcagaggccgaggccgcctcggcctctgagctattccagaagtagtgaggaggcttttttggaggcctaggcttttgcaaa

SEQ ID NO: 486 - DNA, 511 bp, synthetic construct
  source 1..511: mol_type = other DNA
ggggttggggttgcgccttttccaaggcagccctgggtttgcgcagggacgcggctgctctgggcgtggttccgggaaacgcagcggcgccgaccctgggtctcgcacattcttcacgtccgttcgcagcgtcacccggatcttcgccgctacccttgtgggccccccggcgacgcttcctgctccgcccctaagtcgggaaggttccttgcggttcgcggcgtgccggacgtgacaaacggaagccgcacgtctcactagtaccctcgcagacggacagcgccagggagcaatggcagcgcgccgaccgcgatgggctgtggccaatagcggctgctcagcagggcgcgccgagagcagcggccgggaaggggcggtgcgggaggcggggtgtggggcggtagtgtgggccctgttcctgcccgcgcggtgttccgcattctgcaagcctccggagcgcacgtcggcagtcggctccctcgttgaccgaatcaccgacctctctccccag

SEQ ID NO: 487 - DNA, 164 bp, synthetic construct
  source 1..164: mol_type = other DNA
gggcggagttagggcggagccaatcagcgtgcgccgttccgaaagttgccttttatggctgggcggagaatgggcggtgaacgccgatgattatataaggacgcgccgggtgtggcacagctagttccgtcgcagccgggatttgggtcgcggttcttgtttgt

SEQ ID NO: 488 - DNA, 326 bp, synthetic construct
  source 1..326: mol_type = other DNA
gggcggagttagggcggagccaatcagcgtgcgccgttccgaaagttgccttttatggctgggcggagaatgggcggtgaacgccgatgattatataaggacgcgccgggtgtggcacagctagttccgtcgcagccgggatttgggtcgcggttcttgtttgtggatccctgtgatcgtcacttggtaagtcactgactgtctatgcctgggaaagggtgggcaggagatggggcagtgcaggaaaagtggcactatgaaccctgcagccctaggaatgcatctagacaattgtactaaccttcttctctttcctctcctgacag

SEQ ID NO: 489 - DNA, 325 bp, synthetic construct
  source 1..325: mol_type = other DNA
ccccgcagccattctagctagcggtaccaatagcaaccggcagctgccctccgcttttgctccgccccttctgcttgcgatctgtttccgcttccggtcccgcagttccggctctgccgtgaagagctttgcattgtgggaagtctttcctttctcgttccccggccatcttagcggctgctgttggtgagtgggctcctaccgaccgaggtttaggcagcgcggggagctttgcgggttgccatttgtaactccggatcctaaaattcctgtcctgttctctgtctcttctaggttgggggccgtcccgctcctaaggcaggaa

SEQ ID NO: 490 - DNA, 243 bp, synthetic construct
  source 1..243: mol_type = other DNA
agccccggaaccttcgctgttctcttacctatgaaccttacgaactgtaaagaaaggcgcaccggaagttgtggtacccaagccatactctcataaatccagccaggtcgcgctgaaacagtttccggaagcacttctcctagatcgcaccgcctcttcctcctggaagctatataatgatatcgcgtcacttccgctctctcttccacaggaggcctacacgccgccgcttgtgctgcagcc

SEQ ID NO: 491 - DNA, 493 bp, synthetic construct
  source 1..493: mol_type = other DNA
ccacgttctgcttcactctccccatctcccccccctccccacccccaattttgtatttatttattttttaattattttgtgcagcgatgggggcggggggggggggggggcgcgcgccaggcggggcggggcggggcgaggggcggggcggggcgaggcggagaggtgcggcggcagccaatcagagcggcgcgctccgaaagtttccttttatggcgaggcggcggcggcggcggccctataaaaagcgaagcgcgcggcgggcgggagcgggatcagccaccgcggtggcggcctagagtcgacgaggaactgaaaaaccagaaagttaactggtaagtttagtctttttgtcttttatttcaggtcccggatccggtggtggtgcaaatcaaagaactgctcctcagtggatgttgcctttacttctaggcctgtacggaagtgttacttctgctctaaaagctgcggaattgtacccgcggccgatcca

SEQ ID NO: 492 - DNA, 565 bp, synthetic construct
  source 1..565: mol_type = other DNA
cgttacataacttacggtaaatggcccgcctggctgaccgcccaacgacccccgcccattgacgtcaatagtaacgccaatagggactttccattgacgtcaatgggtggagtatttacggtaaactgcccacttggcagtacatcaagtgtatcatatgccaagtacgccccctattgacgtcaatgacggtaaatggcccgcctggcattgtgcccagtacatgaccttatgggactttcctacttggcagtacatctacgtattagtcatcgctattaccatggtcgaggtgagccccacgttctgcttcactctccccatctcccccccctccccacccccaattttgtatttatttattttttaattattttgtgcagcgatgggggcggggggggggggggggcgcgcgccaggcggggcggggcggggcgaggggcggggcggggcgaggcggagaggtgcggcggcagccaatcagagcggcgcgctccgaaagtttccttttatggcgaggcggcggcggcggcggccctataaaaagcgaagcgcgcggcgggcg

SEQ ID NO: 493 - DNA, 204 bp, synthetic construct
  source 1..204: mol_type = other DNA
gtgatgcggttttggcagtacatcaatgggcgtggatagcggtttgactcacggggatttccaagtctccaccccattgacgtcaatgggagtttgttttggcaccaaaatcaacgggactttccaaaatgtcgtaacaactccgccccattgacgcaaatgggcggtaggcgtgtacggtgggaggtctatataagcagagct

SEQ ID NO: 494 - DNA, 249 bp, synthetic construct
  source 1..249: mol_type = other DNA
gagggcctatttcccatgattccttcatatttgcatatacgatacaaggctgttagagagataattggaattaatttgactgtaaacacaaagatattagtacaaaatacgtgacgtagaaagtaataatttcttgggtagtttgcagttttaaaattatgttttaaaatggactatcatatgcttaccgtaacttgaaagtatttcgatttcttggctttatatatcttgtggaaaggacgaaacacc

SEQ ID NO: 495 - DNA, 223 bp, synthetic construct
  source 1..223: mol_type = other DNA
gaacgctgacgtcatcaacccgctccaaggaatcgcgggcccagtgtcactaggcgggaacacccagcgcgcgtgcgccctggcaggaagatggctgtgagggacaggggagtggcgccctgcaatatttgcatgtcgctatgtgttctgggaaatcaccataaacgtgaaatgtctttggatttgggaatcttataagttctgtatgagaccactctttccc

SEQ ID NO: 496 - DNA, 267 bp, synthetic construct
  source 1..267: mol_type = other DNA
ggacagcaagactctcgaggcgttctgcagtatttagcatgccccacccatctgcaaggcattctggatagtgtcaaaacagccggaaatcaagtccgtttatctcaaactttagcattttgggaataaatgatatttgctatgctggttaaattagattttagttaaatttcctgctgaagctctagtacgataagcaacttgacctaagtgtaaagttgagacttccttcaggtttatatagcttgtgcgccgcttgggtacctc

SEQ ID NO: 497 - DNA, 103 bp, synthetic construct
  source 1..103: mol_type = other DNA
gagggcctatttcccatgattccttcatatttgcatatacgatagcttaccgtaacttgaaagtatttcgatttcttggctttatatatcttgtggaaaggac

SEQ ID NO: 498 - DNA, 38 bp, synthetic construct
  source 1..38: mol_type = other DNA
tttcgatttcttggctttatatatcttgtggaaaggac

SEQ ID NO: 499 - DNA, 67 bp, synthetic construct
  source 1..67: mol_type = other DNA
atacgatagcttaccgtaacttgaaagtatttcgatttcttggctttatatatcttgtggaaaggac

SEQ ID NO: 500 - DNA, 79 bp, synthetic construct
  source 1..79: mol_type = other DNA
gagggcctatttcccatgattccttcatatttgcattttcgatttcttggctttatatatcttgtggaaaggacgaaac

SEQ ID NO: 501 - DNA, 111 bp, synthetic construct
  source 1..111: mol_type = other DNA
gagggcctatttcccatgattccttcatatttgcatatttgcatatacgatagcttaccgtaacttgaaagtatttcgatttcttggctttatatatcttgtggaaaggac

SEQ ID NO: 502 - DNA, 127 bp, synthetic construct
  source 1..127: mol_type = other DNA
gagggcctatttcccatgattccttcatatttgcatatttgcatatttgcatatttgcatatacgatagcttaccgtaacttgaaagtatttcgatttcttggctttatatatcttgtggaaaggac

SEQ ID NO: 503 - DNA, 123 bp, synthetic construct
  source 1..123: mol_type = other DNA
gagggcctatttcccatgattccttcatatttcccatgattccttcatatttgcatatacgatagcttaccgtaacttgaaagtatttcgatttcttggctttatatatcttgtggaaaggac

SEQ ID NO: 504 - DNA, 143 bp, synthetic construct
  source 1..143: mol_type = other DNA
gagggcctatttcccatgattccttcatatttcccatgattccttcatatttcccatgattccttcatatttgcatatacgatagcttaccgtaacttgaaagtatttcgatttcttggctttatatatcttgtggaaaggac

SEQ ID NO: 505 - DNA, 131 bp, synthetic construct
  source 1..131: mol_type = other DNA
gagggcctatttcccatgattccttcatatttgcatatttcccatgattccttcatatttgcatatacgatagcttaccgtaacttgaaagtatttcgatttcttggctttatatatcttgtggaaaggac

SEQ ID NO: 506 - DNA, 159 bp, synthetic construct
  source 1..159: mol_type = other DNA
gagggcctatttcccatgattccttcatatttgcatatttcccatgattccttcatatttgcatatttcccatgattccttcatatttgcatatacgatagcttaccgtaacttgaaagtatttcgatttcttggctttatatatcttgtggaaaggac

SEQ ID NO: 507 - DNA, 103 bp, synthetic construct
  source 1..103: mol_type = other DNA
gagggcctatttcccatgattccttcatatgcaaatatacgatagcttaccgtaacttgaaagtatttcgatttcttggctttatatatcttgtggaaaggac

SEQ ID NO: 508 - DNA, 111 bp, synthetic construct
  source 1..111: mol_type = other DNA
gagggcctatttcccatgattccttcatatgcaaatatgcaaatatacgatagcttaccgtaacttgaaagtatttcgatttcttggctttatatatcttgtggaaaggac

SEQ ID NO: 509 - DNA, 127 bp, synthetic construct
  source 1..127: mol_type = other DNA
gagggcctatttcccatgattccttcatatgcaaatatgcaaatatgcaaatatgcaaatatacgatagcttaccgtaacttgaaagtatttcgatttcttggctttatatatcttgtggaaaggac

SEQ ID NO: 510 - DNA, 103 bp, synthetic construct
  source 1..103: mol_type = other DNA
gagggcctatgcaaatatgaaggaatcatgggaaatatacgatagcttaccgtaacttgaaagtatttcgatttcttggctttatatatcttgtggaaaggac

SEQ ID NO: 511 - DNA, 131 bp, synthetic construct
  source 1..131: mol_type = other DNA
gagggcctatgcaaatatgaaggaatcatgggaaatatgcaaatatgaaggaatcatgggaaatatacgatagcttaccgtaacttgaaagtatttcgatttcttggctttatatatcttgtggaaaggac

SEQ ID NO: 512 - DNA, 159 bp, synthetic construct
  source 1..159: mol_type = other DNA
gagggcctatgcaaatatgaaggaatcatgggaaatatgcaaatatgaaggaatcatgggaaatatgcaaatatgaaggaatcatgggaaatatacgatagcttaccgtaacttgaaagtatttcgatttcttggctttatatatcttgtggaaaggac

SEQ ID NO: 513 - DNA, 128 bp, synthetic construct
  source 1..128: mol_type = other DNA
gagggcctatttcccatgattccttcatatttgcatatacgtttgactgtaaatacgtgacgtagaatagcttaccgtaacttgaaagtatttcgatttcttggctttatatatcttgtggaaaggac

SEQ ID NO: 514 - DNA, 208 bp, synthetic construct
  source 1..208: mol_type = other DNA
ctgtgccttctagttgccagccatctgttgtttgcccctcccccgtgccttccttgaccctggaaggtgccactcccactgtcctttcctaataaaatgaggaaattgcatcgcattgtctgagtaggtgtcattctattctggggggtggggtggggcaggacagcaagggggaggattgggaagagaatagcaggcatgctgggga

SEQ ID NO: 515 - DNA, 623 bp, synthetic construct
  source 1..623: mol_type = other DNA
gggtggcatccctgtgacccctccccagtgcctctcctggccctggaagttgccactccagtgcccaccagccttgtcctaataaaattaagttgcatcattttgtctgactaggtgtccttctataatattatggggtggaggggggtggtatggagcaaggggcaagttgggaagacaacctgtagggcctgcggggtctattgggaaccaagctggagtgcagtggcacaatcttggctcactgcaatctccgcctcctgggttcaagcgattctcctgcctcagcctcccgagttgttgggattccaggcatgcatgaccaggctcagctaatttttgtttttttggtagagacggggtttcaccatattggccaggctggtctccaactcctaatctcaggtgatctacccaccttggcctcccaaattgctgggattacaggcgtgaaccactgctcccttccctgtccttctgattttaaaataactataccagcaggaggacgtccagacacagcataggctacctggccatgcccaaccggtgggacatttgagttgcttgcttggcactgtcctctcatgcgttgggtccactcagtagatgcctgttgaatt

SEQ ID NO: 516 - DNA, 477 bp, synthetic construct
  source 1..477: mol_type = other DNA
gggtggcatccctgtgacccctccccagtgcctctcctggccctggaagttgccactccagtgcccaccagccttgtcctaataaaattaagttgcatcattttgtctgactaggtgtccttctataatattatggggtggaggggggtggtatggagcaaggggcaagttgggaagacaacctgtagggcctgcggggtctattgggaaccaagctggagtgcagtggcacaatcttggctcactgcaatctccgcctcctgggttcaagcgattctcctgcctcagcctcccgagttgttgggattccaggcatgcatgaccaggctcagctaatttttgtttttttggtagagacggggtttcaccatattggccaggctggtctccaactcctaatctcaggtgatctacccaccttggcctcccaaattgctgggattacaggcgtgaaccactgctcccttccctgtcctt

SEQ ID NO: 517 - DNA, 49 bp, synthetic construct
  source 1..49: mol_type = other DNA
cggcaataaaaagacagaataaaacgcacgggtgttgggtcgtttgttc

SEQ ID NO: 518 - DNA, 49 bp, synthetic construct
  source 1..49: mol_type = other DNA
aataaaagatctttattttcattagatctgtgtgttggttttttgtgtg

SEQ ID NO: 519 - DNA, 122 bp, synthetic construct
  source 1..122: mol_type = other DNA
aacttgtttattgcagcttataatggttacaaataaagcaatagcatcacaaatttcacaaataaagcatttttttcactgcattctagttgtggtttgtccaaactcatcaatgtatctta

SEQ ID NO: 520 - DNA, 82 bp, synthetic construct
  source 1..82: mol_type = other DNA
aacttgtttattgcagcttataatggttacaaataaagcaatagcatcacaaatttcacaaataaagcatttttttcactgc

SEQ ID NO: 521 - DNA, 395 bp, synthetic construct
  source 1..395: mol_type = other DNA
gctcgctttcttgctgtccaatttctattaaaggttcctttgttccctaagtccaactactaaactgggggatattatgaagggccttgagcatctggattctgcctaataaaaaacatttattttcattgcaatgatgtatttaaattatttctgaatattttactaaaaagggaatgtgggaggtcagtgcatttaaaacataaagaaatgaagagctagttcaaaccttgggaaaatacactatatcttaaactccatgaaagaaggtgaggctgcaaacagctaatgcacattggcaacagcccctgatgcctatgccttattcatccctcagaaaaggattcaagtagaggcttgatttggaggttaaagttttgctatgctgtatttta

SEQ ID NO: 522 - DNA, 56 bp, synthetic construct
  source 1..56: mol_type = other DNA
aataaaggaaatttattttcattgcaatagtgtgttggaattttttgtgtctctca

SEQ ID NO: 523 - DNA, 181 bp, synthetic construct
  source 1..181: mol_type = other DNA
tatttgtgaaatttgtgatgctattgctttatttgtaaccatctagctttatttgtgaaatttgtgatgctattgctttatttgtaaccattataagctgcaataaacaagttaacaacaacaattgcattcattttatgtttcaggttcagggggagatgtgggaggttttttaaagcgg

SEQ ID NO: 524 - DNA, 592 bp, synthetic construct
  source 1..592: mol_type = other DNA
aatcaacctctggattacaaaatttgtgaaagattgactggtattcttaactatgttgctccttttacgctatgtggatacgctgctttaatgcctttgtatcatgctattgcttcccgtatggctttcattttctcctccttgtataaatcctggttgctgtctctttatgaggagttgtggcccgttgtcaggcaacgtggcgtggtgtgcactgtgtttgctgacgcaacccccactggttggggcattgccaccacctgtcagctcctttccgggactttcgctttccccctccctattgccacggcggaactcatcgccgcctgccttgcccgctgctggacaggggctcggctgttgggcactgacaattccgtggtgttgtcggggaagctgacgtcctttccatggctgctcgcctgtgttgccacctggattctgcgcgggacgtccttctgctacgtcccttcggccctcaatccagcggaccttccttcccgcggcctgctgccggctctgcggcctcttccgcgtcttcgccttcgccctcagacgagtcggatctccctttgggccgcctccccgcctg

SEQ ID NO: 525 - DNA, 593 bp, synthetic construct
  source 1..593: mol_type = other DNA
atcgataatcaacctctggattacaaaatttgtgaaagattgactggtattcttaactatgttgctccttttacgctatgtggatacgctgctttaatgcctttgtatcatgctattgcttcccgtatggctttcattttctcctccttgtataaatcctggttgctgtctctttatgaggagttgtggcccgttgtcaggcaacgtggcgtggtgtgcactgtgtttgctgacgcaacccccactggttggggcattgccaccacctgtcagctcctttccgggactttcgctttccccctccctattgccacggcggaactcatcgccgcctgccttgcccgctgctggacaggggctcggctgttgggcactgacaattccgtggtgttgtcggggaaatcatcgtcctttccttggctgctcgcctgtgttgccacctggattctgcgcgggacgtccttctgctacgtcccttcggccctcaatccagcggaccttccttcccgcggcctgctgccggctctgcggcctcttccgcgtcttcgccttcgccctcagacgagtcggatctccctttgggccgcctcccc

SEQ ID NO: 526 - DNA, 247 bp, synthetic construct
  source 1..247: mol_type = other DNA
gataatcaacctctggattacaaaatttgtgaaagattgactggtattcttaactatgttgctccttttacgctatgtggatacgctgctttaatgcctttgtatcatgctattgcttcccgtatggctttcattttctcctccttgtataaatcctggttagttcttgccacggcggaactcatcgccgcctgccttgcccgctgctggacaggggctcggctgttgggcactgacaattccgtgg

SEQ ID NO: 527 - DNA, 584 bp, synthetic construct; identical to SEQ ID NO: 463
  source 1..584: mol_type = other DNA

SEQ ID NO: 528 - DNA, 204 bp, synthetic construct; identical to SEQ ID NO: 493
  source 1..204: mol_type = other DNA

SEQ ID NO: 529 - DNA, 414 bp, synthetic construct
  source 1..414: mol_type = other DNA
aagatgcgtcaattaatttgcgtcaatttgcgctcaatttgcgtcaatcttgctgtcatttgcgtcaatttgcgtcaatatgcgtcaatatatgcgtcaattcgaattcgcactaatgatgactaatggtggctaatggtgactaatggtgacaatgcgtgactaatggtgataatgagtgcatatggtgactaatggtgactaatggtggtgatgcggttttggcagtacatcaatgggcgtggatagcggtttgactcacggggatttccaagtctccaccccattgacgtcaatgggagtttgttttggcaccaaaatcaacgggactttccaaaatgtcgtaacaactccgccccattgacgcaaatgggcggtaggcgtgtacggtgggaggtctatataagcagagct

SEQ ID NO: 530 - DNA, 314 bp, synthetic construct
  source 1..314: mol_type = other DNA
tgggacagaaaacgagaaaccagggttgtcagcggggcccgcgccggccgccccttggcccgcgggataccccgggcgcccagtgcccaggccgggcaggcggcactcacgtgatgcggttttggcagtacatcaatgggcgtggatagcggtttgactcacggggatttccaagtctccaccccattgacgtcaatgggagtttgttttggcaccaaaatcaacgggactttccaaaatgtcgtaacaactccgccccattgacgcaaatgggcggtaggcgtgtacggtgggaggtctatataagcagagct

SEQ ID NO: 531 - DNA, 324 bp, synthetic construct
  source 1..324: mol_type = other DNA
cggaagcgagggtgtcgctcgcccccgggcccgggtccgccccgctccgaggcctgctcggaagaaagacctcggtgcgcagttctcgtcgcgctcccacacctggtccgcccagtcggagtgatgcggttttggcagtacatcaatgggcgtggatagcggtttgactcacggggatttccaagtctccaccccattgacgtcaatgggagtttgttttggcaccaaaatcaacgggactttccaaaatgtcgtaacaactccgccccattgacgcaaatgggcggtaggcgtgtacggtgggaggtctatataagcagagct

SEQ ID NO: 532 - DNA, 304 bp, synthetic construct
  source 1..304: mol_type = other DNA
gtgatgcggttttggcagtacatcaatgggcgtggataggcgggccgggagcgagggaggcggcgccgggggacgcgccgggctcggcctggcgaccgttgcccgctcgcgtccatccatccattcattcgggcggcagcggtttgactcacggggatttccaagtctccaccccattgacgtcaatgggagtttgttttggcaccaaaatcaacgggactttccaaaatgtcgtaacaactccgccccattgacgcaaatgggcggtaggcgtgtacggtgggaggtctatataagcagagct

SEQ ID NO: 533 - DNA, 304 bp, synthetic construct
  source 1..304: mol_type = other DNA
aggcgggccgggagcgagggaggcggcgccgggggacgcgccgggctcggcctggcgaccgttgcccgctcgcgtccatccatccattcattcgggcggcgtgatgcggttttggcagtacatcaatgggcgtggatagcggtttgactcacggggatttccaagtctccaccccattgacgtcaatgggagtttgttttggcaccaaaatcaacgggactttccaaaatgtcgtaacaactccgccccattgacgcaaatgggcggtaggcgtgtacggtgggaggtctatataagcagagct

SEQ ID NO: 534 - DNA, 274 bp, synthetic construct
  source 1..274: mol_type = other DNA
ccttcccctccagtgctcctcggagcccttccctatacttcctccaagctccaccctcgatcagccctgcgtgatgcggttttggcagtacatcaatgggcgtggatagcggtttgactcacggggatttccaagtctccaccccattgacgtcaatgggagtttgttttggcaccaaaatcaacgggactttccaaaatgtcgtaacaactccgccccattgacgcaaatgggcggtaggcgtgtacggtgggaggtctatataagcagagct

SEQ ID NO: 535 - DNA, 354 bp, synthetic construct
  source 1..354: mol_type = other DNA
agaggtggtggggctgagccgaggtggggccgtggccagggggagggggtgctaggccggaaggggctgcagccgagggtggccctgattttgtggccggccaggagcgaaggggtccctttctgtcccctgagcaccgtcgcctcctttgtgatgcggttttggcagtacatcaatgggcgtggatagcggtttgactcacggggatttccaagtctccaccccattgacgtcaatgggagtttgttttggcaccaaaatcaacgggactttccaaaatgtcgtaacaactccgccccattgacgcaaatgggcggtaggcgtgtacggtgggaggtctatataagcagagct

SEQ ID NO: 536 - DNA, 20 bp, synthetic construct
  source 1..20: mol_type = other DNA
tatagcatacattatacgaa

SEQ ID NO: 537 - DNA, 18 bp, synthetic construct
  source 1..18: mol_type = other DNA
gggtcttcgagaagaccc

SEQ ID NO: 538 - protein, 9 aa, synthetic construct
PKKKRKVSR

SEQ ID NO: 539 - protein, 39 aa, synthetic construct
PKKKRKVGGSPKKKRKVGGSPKKKRKVGGSPKKKRKVSR

SEQ ID NO: 540 - protein, 59 aa, synthetic construct
PKKKRKVGGSPKKKRKVGGSPKKKRKVGGSPKKKRKVGGSPKKKRKVGGSPKKKRKVSR

SEQ ID NO: 541 - protein, 11 aa, synthetic construct
PAAKRVKLDSR

SEQ ID NO: 542 - protein, 23 aa, synthetic construct
PAAKRVKLDGGSPAAKRVKLDSR

SEQ ID NO: 543 - protein, 47 aa, synthetic construct
PAAKRVKLDGGSPAAKRVKLDGGSPAAKRVKLDGGSPAAKRVKLDSR

SEQ ID NO: 544 - protein, 71 aa, synthetic construct
PAAKRVKLDGGSPAAKRVKLDGGSPAAKRVKLDGGSPAAKRVKLDGGSPAAKRVKLDGGSPAAKRVKLDSR

SEQ ID NO: 545 - protein, 18 aa, synthetic construct
KRPAATKKAGQAKKKKSR

SEQ ID NO: 546 - protein, 37 aa, synthetic construct
KRPAATKKAGQAKKKKGGSKRPAATKKAGQAKKKKSR

SEQ ID NO: 547 - protein, 21 aa, synthetic construct
PAAKRVKLDGGSPKKKRKVSR

SEQ ID NO: 548 - protein, 21 aa, synthetic construct
PAAKKKKLDGGSPKKKRKVSR

SEQ ID NO: 549 - protein, 11 aa, synthetic construct
PAAKKKKLDSR

SEQ ID NO: 550 - protein, 35 aa, synthetic construct
PAAKKKKLDGGSPAAKKKKLDGGSPAAKKKKLDSR

SEQ ID NO: 551 - protein, 47 aa, synthetic construct
PAAKKKKLDGGSPAAKKKKLDGGSPAAKKKKLDGGSPAAKKKKLDSR

SEQ ID NO: 552 - protein, 13 aa, synthetic construct
PAKRARRGYKCSR

SEQ ID NO: 553 - protein, 26 aa, synthetic construct
PAKRARRGYKCGSPAKRARRGYKCSR

SEQ ID NO: 554 - protein, 9 aa, synthetic construct
PRRKREESR

SEQ ID NO: 555 - protein, 9 aa, synthetic construct
PYRGRKESR

SEQ ID NO: 556 - protein, 10 aa, synthetic construct
PLRKRPRRSR

SEQ ID NO: 557 - protein, 20 aa, synthetic construct
PLRKRPRRGSPLRKRPRRSR

SEQ ID NO: 558 - protein, 32 aa, synthetic construct
PAAKRVKLDGGKRTADGSEFESPKKKRKVGGS

SEQ ID NO: 559 - protein, 34 aa, synthetic construct
PAAKRVKLDGGKRTADGSEFESPKKKRKVPPPPG

SEQ ID NO: 560 - protein, 39 aa, synthetic construct
PAAKRVKLDGGKRTADGSEFESPKKKRKVGIHGVPAAPG

SEQ ID NO: 561 - protein, 39 aa, synthetic construct
PAAKRVKLDGGKRTADGSEFESPKKKRKVGGGSGGGSPG

SEQ ID NO: 562 - protein, 40 aa, synthetic construct
PAAKRVKLDGGKRTADGSEFESPKKKRKVPGGGSGGGSPG

SEQ ID NO: 563 - protein, 48 aa, synthetic construct
PAAKRVKLDGGKRTADGSEFESPKKKRKVAEAAAKEAAAKEAAAKAPG

SEQ ID NO: 564 - protein, 31 aa, synthetic construct; identical to SEQ ID NO: 391

SEQ ID NO: 565 - protein, 22 aa, synthetic construct
PAAKRVKLDGGSPKKKRKVGGS

SEQ ID NO: 566 - protein, 21 aa, synthetic construct
PAAKRVKLDPPPPKKKRKVPG

SEQ ID NO: 567 - protein, 11 aa, synthetic construct
PAAKRVKLDPG

SEQ ID NO: 568 - protein, 21 aa, synthetic construct
PAAKRVKLDGGGSGGGSGGGS

SEQ ID NO: 569 - protein, 12 aa, synthetic construct
PAAKRVKLDPPP

SEQ ID NO: 570 - protein, 24 aa, synthetic construct
PAAKRVKLDGGGSGGGSGGGSPPP

SEQ ID NO: 571 - protein, 10 aa, synthetic construct
PKKKRKVPPP

SEQ ID NO: 572 - protein, 10 aa, synthetic construct
PKKKRKVGGS

SEQ ID NO: 573 - protein, 9 aa, synthetic construct
GSPKKKRKV

SEQ ID NO: 574 - protein, 39 aa, synthetic construct
GSPKKKRKVGGSPKKKRKVGGSPKKKRKVGGSPKKKRKV

SEQ ID NO: 575 - protein, 59 aa, synthetic construct
GSPKKKRKVGGSPKKKRKVGGSPKKKRKVGGSPKKKRKVGGSPKKKRKVGGSPKKKRKV

SEQ ID NO: 576 - protein, 11 aa, synthetic construct
GSPAAKRVKLD

SEQ ID NO: 577 - protein, 23 aa, synthetic construct
GSPAAKRVKLDGGSPAAKRVKLD

SEQ ID NO: 578 - protein, 47 aa, synthetic construct
GSPAAKRVKLDGGSPAAKRVKLDGGSPAAKRVKLDGGSPAAKRVKLD

SEQ ID NO: 579 - protein, 71 aa, synthetic construct
GSPAAKRVKLDGGSPAAKRVKLDGGSPAAKRVKLDGGSPAAKRVKLDGGSPAAKRVKLDGGSPAAKRVKLD

SEQ ID NO: 580 - protein, 18 aa, synthetic construct
GSKRPAATKKAGQAKKKK

SEQ ID NO: 581 - protein, 35 aa, synthetic construct
KRPAATKKAGQAKKKKGGSKRPAATKKAGQAKKKK

SEQ ID NO: 582 - protein, 41 aa, synthetic construct
GSPAAKRVKLGGSPAAKRVKLGGSPKKKRKVGGSPKKKRKV

SEQ ID NO: 583 - protein, 15 aa, synthetic construct
GSKLGPRKATGRWGS

SEQ ID NO: 584 - protein, 19 aa, synthetic construct
GSKRKGSPERGERKRHWGS

SEQ ID NO: 585 - protein, 31 aa, synthetic construct
GSPKKKRKVGSGSKRPAATKKAGQAKKKKLE

SEQ ID NO: 586 - protein, 30 aa, synthetic construct
GPKRTADSQHSTPPKTKRKVEFEPKKKRKV

SEQ ID NO: 587 - protein, 36 aa, synthetic construct
GGGSGGGSKRTADSQHSTPPKTKRKVEFEPKKKRKV

SEQ ID NO: 588 - protein, 45 aa, synthetic construct
AEAAAKEAAAKEAAAKAKRTADSQHSTPPKTKRKVEFEPKKKRKV

SEQ ID NO: 589 - protein, 40 aa, synthetic construct
GPPKKKRKVGGSKRTADSQHSTPPKTKRKVEFEPKKKRKV

SEQ ID NO: 590 - protein, 28 aa, synthetic construct
GPAEAAAKEAAAKEAAAKAPAAKRVKLD

SEQ ID NO: 591 - protein, 23 aa, synthetic construct
GPGGGSGGGSGGGSPAAKRVKLD

SEQ ID NO: 592 - protein, 21 aa, synthetic construct
GPPKKKRKVPPPPAAKRVKLD

SEQ ID NO: 593 - protein, 11 aa, synthetic construct
GPPAAKRVKLD

SEQ ID NO: 594 - protein, 9 aa, synthetic construct
GSPKKKRKV

SEQ ID NO: 595 - protein, 11 aa, synthetic construct
GSPAAKRVKLD

SEQ ID NO: 596 - protein, 19 aa, synthetic construct
VGSKRPAATKKAGQAKKKK

SEQ ID NO: 597 - protein, 44 aa, synthetic construct
TGGGPGGGAAAGSGSPKKKRKVGSGSKRPAATKKAGQAKKKKLE

SEQ ID NO: 598 - protein, 25 aa, synthetic construct
MSRRRKANPTKLSENAKKLAKEVEN

SEQ ID NO: 599 - protein, 26 aa, synthetic construct
TGGGPGGGAAAGSGSPKKKRKVGSGS

SEQ ID NO: 600 - protein, 13 aa, synthetic construct
PPPPKKKRKVPPP

SEQ ID NO: 601 - protein, 13 aa, synthetic construct
GGSPKKKRKVPPP

SEQ ID NO: 602 - protein, 10 aa, synthetic construct
PPPPKKKRKV

SEQ ID NO: 603 - protein, 10 aa, synthetic construct
GGSPKKKRKV

SEQ ID NO: 604 - protein, 19 aa, synthetic construct
GGSPKKKRKVGGSGGSGGS

SEQ ID NO: 605 - protein, 20 aa, synthetic construct
GGSPKKKRKVGGSPKKKRKV

SEQ ID NO: 606 - protein, 26 aa, synthetic construct
GGSGGSGGSPKKKRKVGGSPKKKRKV

SEQ ID NO: 607 - protein, 22 aa, synthetic construct
VGGGSGGGSGGGSPAAKRVKLD

SEQ ID NO: 608 - protein, 13 aa, synthetic construct
VPPPPAAKRVKLD

SEQ ID NO: 609 - protein, 25 aa, synthetic construct
VPPPGGGSGGGSGGGSPAAKRVKLD

SEQ ID NO: 610 - protein, 22 aa, synthetic construct
VGGGSGGGSGGGSPAAKRVKLD

SEQ ID NO: 611-612 - skipped (2 entries)

SEQ ID NO: 613 - protein, 12 aa, synthetic construct
VGSPAAKRVKLD

SEQ ID NO: 614 - DNA, 54 bp, synthetic construct
  source 1..54: mol_type = other DNA
gtggcccaggcaggcagacccaccaggggtccctgaaggccagcccttgagaag

SEQ ID NO: 615 - DNA, 67 bp, synthetic construct
  source 1..67: mol_type = other DNA
gtcatacaactttcctgaagttgtatgacctctctgagccttagtctcctcgtttgtaaaatgagag

SEQ ID NO: 616 - DNA, 62 bp, synthetic construct
  source 1..62: mol_type = other DNA
gtaagagcatagtgcacaggactgctggtggccaggaggcccagccctggatcttcctccag

SEQ ID NO: 617 - DNA, 49 bp, synthetic construct
  source 1..49: mol_type = other DNA
gtatgagacaccacacctgcccatttttgtttggttttttaatgggcag

SEQ ID NO: 618 - DNA, 59 bp, synthetic construct
  source 1..59: mol_type = other DNA
gtacaaatatatatcaaattcatagatatctattggtacctcatataagtaccatagag

SEQ ID NO: 619 - DNA, 67 bp, synthetic construct
  source 1..67: mol_type = other DNA
gttccggagccccggcgcgggcgggttctggggtgtagacgctgctggccagcccgccccagccgag

SEQ ID NO: 620 - DNA, 66 bp, synthetic construct
  source 1..66: mol_type = other DNA
gtgtttgacggcatcccaccgccctacgacaagaaaaagcggatggtggttcctgctgccctcaag

SEQ ID NO: 621 - DNA, 86 bp, synthetic construct
  source 1..86: mol_type = other DNA
gtcgccaggtagggctgggggccgagggaccggctcgggggcgggggggaagtgtgcctgaccggtctctgtcctcagcgagggag

SEQ ID NO: 622 - DNA, 67 bp, synthetic construct
  source 1..67: mol_type = other DNA
gtgggtcccagccccgcccgctgcccggccgccccgcaggtcccccgtgacaccggctcctcctcag

SEQ ID NO: 623 - DNA, 70 bp, synthetic construct
  source 1..70: mol_type = other DNA
gtaagtgcagaggctggcagagggcagcccatgcccccacctgccacctcacaagcctctcctcccacag

SEQ ID NO: 624 - DNA, 476 bp, synthetic construct
  source 1..476: mol_type = other DNA
gtgagtctatgggacccttgatgttttctttccccttcttttctatggttaagttcatgtcataggaaggggagaagtaacagggtacacatattgaccaaatcagggtaattttgcatttgtaattttaaaaaatgctttcttcttttaatatacttttttgtttatcttatttctaatactttccctaatctctttctttcagggcaataatgatacaatgtatcatgcctctttgcaccattctaaagaataacagtgataatttctgggttaaggcaatagcaatatttctgcatataaatatttctgcatataaattgtaactgatgtaagaggtttcatattgctaatagcagctacaatccagctaccattctgcttttattttatggttgggataaggctggattattctgagtccaagctaggcccttttgctaatcatgttcatacctcttatcttcctcccacag

SEQ ID NO: 625 - DNA, 69 bp, synthetic construct
  source 1..69: mol_type = other DNA
gtaagtggagactagggggctggggttgcaccctcccagtctgactcctcactgccgccgcctcctcag

SEQ ID NO: 626 - DNA, 69 bp, synthetic construct
  source 1..69: mol_type = other DNA
gtgagctggcgcccccagggcggctccgggcccaggcccgtccagggcataaccccctgtctcccctag

SEQ ID NO: 627 - DNA, 70 bp, synthetic construct
  source 1..70: mol_type = other DNA
gtaggcgcctggggcgggcaggagggtacacgggcgtaaactgagtctcaccgctttcctctccctgcag

SEQ ID NO: 628 - DNA, 70 bp, synthetic construct
  source 1..70: mol_type = other DNA
gtgagttgggactaggggttgggtctgggtccagacccggcccagccatcacacacctgccctccctcag

SEQ ID NO: 629 - DNA, 108 bp, synthetic construct
  source 1..108: mol_type = other DNA
gtacgatggcacctccggcaaagagagccaggagaggtaagggtgtgttagtaaagtggggggaggggaaagatttaataacttaactaagtatgtgtttttttatag

SEQ ID NO: 630 - DNA, 69 bp, synthetic construct
  source 1..69: mol_type = other DNA
gtgagctgcgcgcgcgcggcggggggcgggcgcccggaccccgctgaggctgcgcccctgtccccgcag

SEQ ID NO: 631 - DNA, 206 bp, synthetic construct
  source 1..206: mol_type = other DNA
gttcgagcttttggagtacgtcgtctttaggttggggggaggggttttatgcgatggagtttccccacactgagtgggtggagactgaagttaggccagcttggcacttgatgtaattctccttggaatttgccctttttgagtttggatcttggttcattctcaagcctcagacagtggttcaaagtttttttcttccatttcag

SEQ ID NO: 632 - DNA, 70 bp, synthetic construct
  source 1..70: mol_type = other DNA
gtgtgtgctgggcagggttgggggctgggggccagggcatgccaggctctgattgccaccccctttttag

SEQ ID NO: 633 - DNA, 68 bp, synthetic construct
  source 1..68: mol_type = other DNA
gtaaggcaggctccctggggcggcaggtgggttgcatggagccaggctgaccctccatgtccccccag

SEQ ID NO: 634 - DNA, 299 bp, synthetic construct
  source 1..299: mol_type = other DNA
gtttgtttccttttttaaaatacattgagtatgcttgccttttagatatagaaatatctgatgctgtctacttcactaaattttgattacatgatttgacagcaatattgaagagtctaacagccagcacgcaggttggtaagtactgtgggaacatcacagattttggctccatgccctaaagagaaattggctttcagattatttggattaaaaacaaagactttcttaagagatgtaaaattttcatgatgttttcttttttgctaaaactaaagaattattcttttacatttcag

SEQ ID NO: 635 - DNA, 226 bp, synthetic construct
  source 1..226: mol_type = other DNA
gtcgctgcgacgctgccttcgccccgtgccccgctccgccgccgcctcgcgccgcccgccccggctctgactgaccgcgttactcccacaggtgagcgggcgggacggcccttctcctccgggctgtaattagctgagcaagaggtaagggtttaagggatggttggttggtggggtattaatgtttaattacctggagcacctgcctgaaatcactttttttcag

SEQ ID NO: 636 - DNA, 71 bp, synthetic construct
  source 1..71: mol_type = other DNA
gtaagagtcagagctggcagggacgtacagtggccacgactggggtactgagctgcagttcacctggcaga

SEQ ID NO: 637 - DNA, 69 bp, synthetic construct
  source 1..69: mol_type = other DNA
gtgggtagggtttgggggagagcgtgggctggggttcagggacaccctctcaccactgccctcccacag

SEQ ID NO: 638 - DNA, 87 bp, synthetic construct
  source 1..87: mol_type = other DNA
gtaagtatacaattggatgtgctaaattgaacaaaataggttcttgtgctattttacttaggtttctctttttttccccacacatag

SEQ ID NO: 639 - DNA, 84 bp, synthetic construct
  source 1..84: mol_type = other DNA
aggtaagggtttaagggatggttggttggtggggtattaatgtttaattacctggagcacctgcctgaaatcactttttttcag

SEQ ID NO: 640 - DNA, 82 bp, synthetic construct
  source 1..82: mol_type = other DNA
gtaagggtttaagggatggttggttggtggggtattaatgtttaattacctgttttacaggcctgaaatcacttggttttag

SEQ ID NO: 641 - DNA, 66 bp, synthetic construct
  source 1..66: mol_type = other DNA
gtgagccaggccgtgggagggcgcccccgagactgccacctgctcaccacccccctctgctcgtag

SEQ ID NO: 642 - DNA, 65 bp, synthetic construct
  source 1..65: mol_type = other DNA
gtgagtgggcgccccggcggggtgggcagtgggcgggcccgagctgaccgcacccctccccacag

SEQ ID NO: 643 - DNA, 66 bp, synthetic construct
  source 1..66: mol_type = other DNA
gtgcgtgagcggggactggcggggggtgcccccacgggaccgcgctgaacccggccccccacacag

SEQ ID NO: 644 - DNA, 106 bp, synthetic construct
  source 1..106: mol_type = other DNA
gtaggatggcgcctcctgcaaaaagagcaagaggtaagggtagttttaagggggtggtgggcatacatataaaactaactgcaaataatttttttatatattacag

SEQ ID NO: 645 - DNA, 69 bp, synthetic construct
  source 1..69: mol_type = other DNA
gtaggccctggcctgcagggactgtgggtgccccctgtccagtaccctcaccatgaccctgttgcccag

SEQ ID NO: 646 - DNA, 68 bp, synthetic construct
  source 1..68: mol_type = other DNA
gtgagtcagggtggggctggccccctgcttcgtgcccatccgcgctctgactctctgcccacctgcag

SEQ ID NO: 647 - DNA, 68 bp, synthetic construct
  source 1..68: mol_type = other DNA
gtactacggcctgggtagggaatggtgggtgggggcgggggaccccttaccaaggccaccctctgcag

SEQ ID NO: 648 - DNA, 97 bp, synthetic construct
  source 1..97: mol_type = other DNA
gtaagtttagtctttttgtcttttatttcaggtcccggatccggtggtggtgcaaatcaaagaactgctcctcagtggatgttgcctttacttctag

SEQ ID NO: 649 - DNA, 140 bp, synthetic construct
  source 1..140: mol_type = other DNA
gtaagtcactgactgtctatgcctgggaaagggtgggcaggagatggggcagtgcaggaaaagtggcactatgaaccctgcagccctaggaatgcatctagacaattgtactaaccttcttctctttcctctcctgacag

SEQ ID NO: 650 - DNA, 133 bp, synthetic construct
  source 1..133: mol_type = other DNA
gtaagtatcaaggttacaagacaggtttaaggagaccaatagaaactgggcttgtcgagacagaggagactcttgcgtttctgataggcacctattggtcttactgacatccactttgcctttctctccacag

SEQ ID NO: 651 - DNA, 190 bp, synthetic construct
  source 1..190: mol_type = other DNA
gtaaatttctagtttttctccttcattttcttggttaggacccttttctctttttatttttttgagctttgatctttctttaaactgatctattttttaattgattggttatggtgtaaatattacatagctttaactgataatctgattactttatttcgtgtgtctatgatgatgatgatagttacag

SEQ ID NO: 652 - DNA, 271 bp, synthetic construct
  source 1..271: mol_type = other DNA
gtaagtaccgcctatagagtctataggcccacccccttggcttcttatgcatgctatactgtttttggcttggggtctatacacccccgcttcctcatgttataggtgatggtatagcttagcctataggtgtgggttattgaccattattgaccactccaacggtggagggcagtgtagtctgagcagtactcgttgctgccgcgcgcgccaccagacataatagctgacagactaacagactgttcctttccatgggtcttttctgcag

SEQ ID NO: 653 - DNA, 96 bp, synthetic construct
  source 1..96: mol_type = other DNA
gtaagtaccgcctatagactctataggcacacccctttggctcttatgcatgctgacagactaacagactgttcctttcctgggtcttttctgcag

SEQ ID NO: 654 - DNA, 110 bp, synthetic construct
  source 1..110: mol_type = other DNA
gtaagtaccgcctatagactctataggcacacccctttggctcttatgcatgaattaatacgactcactatagggagacagactgttcctttcctgggtcttttctgcag

SEQ ID NO: 655 - DNA, 270 bp, synthetic construct
  source 1..270: mol_type = other DNA
gtaagtaccgcctatagactctataggcacacccctttggctcttatgcatgctatactgtttttggcttggggcctatacacccccgcttccttatgctataggtgatggtatagcttagcctataggtgtgggttattgaccattattgaccactccaacggtggagggcagtgtagtctgagcagtactcgttgctgccgcgcgcgccaccagacataatagctgacagactaacagactgttcctttccatgggtcttttctgcag

SEQ ID NO: 656 - DNA, 116 bp, synthetic construct
  source 1..116: mol_type = other DNA
gtaagtactttgctacatccatactccatccttcccatcccttattcctttgaacctttcagttcgagctttcccacttcatcgcagcttgactaacagctaccccgcttgagcag

SEQ ID NO: 657 - DNA, 67 bp, synthetic construct
  source 1..67: mol_type = other DNA
gtaggttcaaccactgatgcctaggcacaccgaaacgactaaccctaattcttatcctttacttcag

SEQ ID NO: 658 - DNA, 66 bp, synthetic construct
  source 1..66: mol_type = other DNA
gtaaatataaaatttttaagtgtataatgtgttaaactactgattctaattgtttgtgtattttag

SEQ ID NO: 659 - DNA, 60 bp, synthetic construct
  source 1..60: mol_type = other DNA
  variation 34..40: note = n is any nucleotide
acactctttccctacacgacgctcttccgatctnnnnnnngacggtaaatggcccgcctg

SEQ ID NO: 660 - DNA, 56 bp, synthetic construct
  source 1..56: mol_type = other DNA
gtgactggagttcagacgtgtgctcttccgatcttgctgtccttgaccagtctcct

SEQ ID NO: 661 - DNA, 241 bp, synthetic construct
  source 1..241: mol_type = other DNA
gagggcctatttcccatgattccttcatatttgcatatacgatacaaggctgttagagagataattggaattaatttgactgtaaacacaaagatattagtacaaaatacgtgacgtagaaagtaataatttcttgggtagtttgcagttttaaaattatgttttaaaatggactatcatatgcttaccgtaacttgaaagtatttcgatttcttggctttatatatcttgtggaaaggac

SEQ ID NO: 662 - DNA, 215 bp, synthetic construct
  source 1..215: mol_type = other DNA
gaacgctgacgtcatcaacccgctccaaggaatcgcgggcccagtgtcactaggcgggaacacccagcgcgcgtgcgccctggcaggaagatggctgtgagggacaggggagtggcgccctgcaatatttgcatgtcgctatgtgttctgggaaatcaccataaacgtgaaatgtctttggatttgggaatcttataagttctgtatgagaccac

SEQ ID NO: 663 - DNA, 244 bp, synthetic construct
  source 1..244: mol_type = other DNA
ctgcagtatttagcatgccccacccatctgcaaggcattctggatagtgtcaaaacagccggaaatcaagtccgtttatctcaaactttagcattttgggaataaatgatatttgctatgctggttaaattagattttagttaaatttcctgctgaagctctagtacgataagtaacttgacctaagtgtaaagttgagatttccttcaggtttatatagcttgtgcgccgcctgggtacctcg

SEQ ID NO: 664 - DNA, 103 bp, synthetic construct; identical to SEQ ID NO: 497
  source 1..103: mol_type = other DNA

SEQ ID NO: 665 - DNA, 38 bp, synthetic construct; identical to SEQ ID NO: 498
  source 1..38: mol_type = other DNA

SEQ ID NO: 666 - DNA, 67 bp, synthetic construct; identical to SEQ ID NO: 499
  source 1..67: mol_type = other DNA

SEQ ID NO: 667 - DNA, 79 bp, synthetic construct; identical to SEQ ID NO: 500
  source 1..79: mol_type = other DNA

SEQ ID NO: 668 - DNA, 111 bp, synthetic construct; identical to SEQ ID NO: 501
  source 1..111: mol_type = other DNA

SEQ ID NO: 669 - DNA, 127 bp, synthetic construct; identical to SEQ ID NO: 502
  source 1..127: mol_type = other DNA

SEQ ID NO: 670 - DNA, 123 bp, synthetic construct; identical to SEQ ID NO: 503
  source 1..123: mol_type = other DNA

SEQ ID NO: 671 - DNA, 143 bp, synthetic construct; identical to SEQ ID NO: 504
  source 1..143: mol_type = other DNA

SEQ ID NO: 672 - DNA, 131 bp, synthetic construct; identical to SEQ ID NO: 505
  source 1..131: mol_type = other DNA

SEQ ID NO: 673 - DNA, 159 bp, synthetic construct; identical to SEQ ID NO: 506
  source 1..159: mol_type = other DNA

SEQ ID NO: 674 - DNA, 103 bp, synthetic construct; identical to SEQ ID NO: 507
  source 1..103: mol_type = other DNA

SEQ ID NO: 675 - DNA, 111 bp, synthetic construct; identical to SEQ ID NO: 508
  source 1..111: mol_type = other DNA

SEQ ID NO: 676 - DNA, 127 bp, synthetic construct; identical to SEQ ID NO: 509
  source 1..127: mol_type = other DNA

SEQ ID NO: 677 - DNA, 103 bp, synthetic construct; identical to SEQ ID NO: 510
  source 1..103: mol_type = other DNA

SEQ ID NO: 678 - DNA, 131 bp, synthetic construct; identical to SEQ ID NO: 511
  source 1..131: mol_type = other DNA

SEQ ID NO: 679 - DNA, 159 bp, synthetic construct; identical to SEQ ID NO: 512
  source 1..159: mol_type = other DNA

SEQ ID NO: 680 - DNA, 128 bp, synthetic construct; identical to SEQ ID NO: 513
  source 1..128: mol_type = other DNA

SEQ ID NO: 681 - DNA, 20 bp, synthetic construct
  source 1..20: mol_type = other DNA
ctgcattctagttgtggttt

SEQ ID NO: 682 - DNA, 19 bp, synthetic construct
  source 1..19: mol_type = other DNA
ctgcattctagttgtggtt

SEQ ID NO: 683 - DNA, 19 bp, synthetic construct
  source 1..19: mol_type = other DNA
ctgcattctagttgtggtt

SEQ ID NO: 684 - DNA, 19 bp, synthetic construct
  source 1..19: mol_type = other DNA
ctgcattctagttgtggtt

SEQ ID NO: 685 - DNA, 19 bp, synthetic construct
  source 1..19: mol_type = other DNA
ctgcattctagttgtggtt

SEQ ID NO: 686 - DNA, 19 bp, synthetic construct
  source 1..19: mol_type = other DNA
ctgcattctagttgtggtt

SEQ ID NO: 687 - DNA, 19 bp, synthetic construct
  source 1..19: mol_type = other DNA
ctgcattctagttgtggtt

SEQ ID NO: 688 - DNA, 19 bp, synthetic construct
  source 1..19: mol_type = other DNA
ctgcattctagttgtggtt

SEQ ID NO: 689 - DNA, 19 bp, synthetic construct
  source 1..19: mol_type = other DNA
ctgcattctagttgtggtt

SEQ ID NO: 690 - DNA, 19 bp, synthetic construct
  source 1..19: mol_type = other DNA
ctgcattctagttgtggtt

SEQ ID NO: 691 - DNA, 89 bp, synthetic construct
  source 1..89: mol_type = other DNA
actggcgcttttatctgattactttgagagccatcaccagcgactatgtcgtagtgggtaaagctccctcttcggagggagcatcaaag

SEQ ID NO: 692 - DNA, 97 bp, synthetic construct
  source 1..97: mol_type = other DNA
actggcacttttatctgattactttgagagccatcaccagcgactatgtcgtatgggtaaagcgcttacggacttcggtccgtaagaagcatcaaag

SEQ ID NO: 693 - DNA, 96 bp, synthetic construct
  source 1..96: mol_type = other DNA
actggcacttctatctgattactctgagagccatcaccagcgactatgtcgtatgggtaaagcgcttacggacttcggtccgtaagaagcatcaga

SEQ ID NO: 694 - DNA, 98 bp, synthetic construct
  source 1..98: mol_type = other DNA
actggcgcttctatctgattactctgagagccatcaccagcgactatgtcgtatgggtaaagccgcttacggacttcggtccgtaagaggcatcagag

SEQ ID NO: 695 - DNA, 98 bp, synthetic construct
  source 1..98: mol_type = other DNA
actggcacttctatctgattactctgagcgccatcaccagcgactatgtcgtatgggtaaagccgcttacggacttcggtccgtaagaggcatcagag

SEQ ID NO: 696 - DNA, 98 bp, synthetic construct
  source 1..98: mol_type = other DNA
actggcgcttctatctgattactctgagcgccatcaccagcgactatgtcgtatgggtaaagccgcttacggacttcggtccgtaagaggcatcagag

SEQ ID NO: 697 - DNA, 98 bp, synthetic construct
  source 1..98: mol_type = other DNA
actggcgcttctatctgattactctgagcgccatcaccagcgactatgtcgtatgggtaaagcgccttacggacttcggtccgtaaggagcatcagag

SEQ ID NO: 698 - DNA, 99 bp, synthetic construct
  source 1..99: mol_type = other DNA
actggcgcttctatctgattactctgagcgccatcaccagcgactatgtcgtagtgggtaaagccgcttacggacttcggtccgtaagaggcatcagag

SEQ ID NO: 699 - DNA, 98 bp, synthetic construct
  source 1..98: mol_type = other DNA
acgggactttctatctgattactctgaagtccctcaccagcgactatgtcgtatgggtaaagccgcttacggacttcggtccgtaagaggcatcagag

SEQ ID NO: 700 - DNA, 98 bp, synthetic construct
  source 1..98: mol_type = other DNA
acctgtagttctatctgattactctgactacagtcaccagcgactatgtcgtatgggtaaagccgcttacggacttcggtccgtaagaggcatcagag

SEQ ID NO: 701 - DNA, 109 bp, synthetic construct
  source 1..109: mol_type = other DNA
actggcgcttttatctgattactttgagagccatcaccagcgactatgtcgtagtgggtaaagctccctcttcggagggagcatcaaagctgcattctagttgtggttt

SEQ ID NO: 702 - DNA, 117 bp, synthetic construct
  source 1..117: mol_type = other DNA
actggcacttttatctgattactttgagagccatcaccagcgactatgtcgtatgggtaaagcgcttacggacttcggtccgtaagaagcatcaaagctgcattctagttgtggttt

SEQ ID NO: 703 - DNA, 117 bp, synthetic construct
  source 1..117: mol_type = other DNA
actggcacttctatctgattactctgagagccatcaccagcgactatgtcgtatgggtaaagcgcttacggacttcggtccgtaagaagcatcagagctgcattctagttgtggttt

SEQ ID NO: 704 - DNA, 118 bp, synthetic construct
  source 1..118: mol_type = other DNA
actggcgcttctatctgattactctgagagccatcaccagcgactatgtcgtatgggtaaagccgcttacggacttcggtccgtaagaggcatcagagctgcattctagttgtggttt

SEQ ID NO: 705 - DNA, 118 bp, synthetic construct
  source 1..118: mol_type = other DNA
actggcacttctatctgattactctgagcgccatcaccagcgactatgtcgtatgggtaaagccgcttacggacttcggtccgtaagaggcatcagagctgcattctagttgtggttt

SEQ ID NO: 706 - DNA, 118 bp, synthetic construct
  source 1..118: mol_type = other DNA
actggcgcttctatctgattactctgagcgccatcaccagcgactatgtcgtatgggtaaagccgcttacggacttcggtccgtaagaggcatcagagctgcattctagttgtggttt

SEQ ID NO: 707 - DNA, 118 bp, synthetic construct
  source 1..118: mol_type = other DNA
actggcgcttctatctgattactctgagcgccatcaccagcgactatgtcgtatgggtaaagcgccttacggacttcggtccgtaaggagcatcagagctgcattctagttgtggttt

SEQ ID NO: 708 - DNA, 118 bp, synthetic construct
  source 1..118: mol_type = other DNA
actggcgcttctatctgattactctgagcgccatcaccagcgactatgtcgtagtgggtaaagccgcttacggacttcggtccgtaagaggcatcagagctgcattctagttgtggtt

SEQ ID NO: 709 - DNA, 117 bp, synthetic construct
  source 1..117: mol_type = other DNA
acgggactttctatctgattactctgaagtccctcaccagcgactatgtcgtatgggtaaagccgcttacggacttcggtccgtaagaggcatcagagctgcattctagttgtggtt

SEQ ID NO: 710 - DNA, 117 bp, synthetic construct
  source 1..117: mol_type = other DNA
acctgtagttctatctgattactctgactacagtcaccagcgactatgtcgtatgggtaaagccgcttacggacttcggtccgtaagaggcatcagagctgcattctagttgtggtt

SEQ ID NO: 711 - RNA, 137 nt, synthetic construct; identical to SEQ ID NO: 432
  source 1..137: mol_type = other RNA

SEQ ID NO: 712 - RNA, 137 nt, synthetic construct; identical to SEQ ID NO: 433
  source 1..137: mol_type = other RNA

SEQ ID NO: 713 - RNA, 137 nt, synthetic construct; identical to SEQ ID NO: 434
  source 1..137: mol_type = other RNA

SEQ ID NO: 714-722 - skipped (9 entries)

SEQ ID NO: 723 - DNA, 60 bp, synthetic construct
  source 1..60: mol_type = other DNA
agcgcgagcacagctaaggccacggagcgagacatctcggcccgaatgctgtcagcttca

SEQ ID NO: 724 - DNA, 60 bp, synthetic construct
  source 1..60: mol_type = other DNA
tgaagctgacagcattcgggccgagatgtctcgctccgtggccttagctgtgctcgcgct

SEQ ID NO: 725 - DNA, 60 bp, synthetic construct
  source 1..60: mol_type = other DNA
agcgcgagcacagctaaggccacggagcgagacatctcggcccgagtgctgtcagcttca

SEQ ID NO: 726 - DNA, 60 bp, synthetic construct
  source 1..60: mol_type = other DNA
tgaagctgacagcactcgggccgagatgtctcgctccgtggccttagctgtgctcgcgct

SEQ ID NO: 727 - DNA, 60 bp, synthetic construct
  source 1..60: mol_type = other DNA
agcgcgagcacagctaaggccacggagcgagacatctcggcccgactgctgtcagcttca

SEQ ID NO: 728 - DNA, 60 bp, synthetic construct
  source 1..60: mol_type = other DNA
tgaagctgacagcagtcgggccgagatgtctcgctccgtggccttagctgtgctcgcgct

SEQ ID NO: 729 - DNA, 60 bp, synthetic construct
  source 1..60: mol_type = other DNA
agcgcgagcacagctaaggccacggagcgagacatctcggcccgattgctgtcagcttca

SEQ ID NO: 730 - DNA, 60 bp, synthetic construct
  source 1..60: mol_type = other DNA
tgaagctgacagcaatcgggccgagatgtctcgctccgtggccttagctgtgctcgcgct

SEQ ID NO: 731 - DNA, 60 bp, synthetic construct; identical to SEQ ID NO: 723
  source 1..60: mol_type = other DNA

SEQ ID NO: 732 - DNA, 60 bp, synthetic construct; identical to SEQ ID NO: 724
  source 1..60: mol_type = other DNA

SEQ ID NO: 733 - DNA, 60 bp, synthetic construct; identical to SEQ ID NO: 725
  source 1..60: mol_type = other DNA

SEQ ID NO: 734 - DNA, 60 bp, synthetic construct; identical to SEQ ID NO: 726
  source 1..60: mol_type = other DNA

SEQ ID NO: 735 - DNA, 60 bp, synthetic construct; identical to SEQ ID NO: 727
  source 1..60: mol_type = other DNA

SEQ ID NO: 736 - DNA, 60 bp, synthetic construct; identical to SEQ ID NO: 728
  source 1..60: mol_type = other DNA

SEQ ID NO: 737 - DNA, 60 bp, synthetic construct; identical to SEQ ID NO: 729
  source 1..60: mol_type = other DNA

SEQ ID NO: 738 - DNA, 60 bp, synthetic construct; identical to SEQ ID NO: 730
  source 1..60: mol_type = other DNA

SEQ ID NO: 739 - DNA, 60 bp, synthetic construct
  source 1..60: mol_type = other DNA
agcgcgagcacagctaaggccacggagcgagacatctcggcccaaatgctgtcagcttca

SEQ ID NO: 740 - DNA, 60 bp, synthetic construct
  source 1..60: mol_type = other DNA
tgaagctgacagcatttgggccgagatgtctcgctccgtggccttagctgtgctcgcgct

SEQ ID NO: 741 - DNA, 60 bp, synthetic construct
  source 1..60: mol_type = other DNA
agcgcgagcacagctaaggccacggagcgagacatctcggccctagtgctgtcagcttca

SEQ ID NO: 742 - DNA, 60 bp, synthetic construct
  source 1..60: mol_type = other DNA
tgaagctgacagcacttgggccgagatgtctcgctccgtggccttagctgtgctcgcgct

SEQ ID NO: 743 - DNA, 60 bp, synthetic construct
  source 1..60: mol_type = other DNA
agcgcgagcacagctaaggccacggagcgagacatctcggccctactgctgtcagcttca

SEQ ID NO: 744 - DNA, 60 bp, synthetic construct
  source 1..60: mol_type = other DNA
tgaagctgacagcagttgggccgagatgtctcgctccgtggccttagctgtgctcgcgct

SEQ ID NO: 745 - DNA, 60 bp, synthetic construct
  source 1..60: mol_type = other DNA
agcgcgagcacagctaaggccacggagcgagacatctcggccctattgctgtcagcttca

SEQ ID NO: 746 - DNA, 60 bp, synthetic construct
  source 1..60: mol_type = other DNA
tgaagctgacagcaattgggccgagatgtctcgctccgtggccttagctgtgctcgcgct

SEQ ID NO: 747 - DNA, 2931 bp, synthetic construct
  source 1..2931: mol_type = other DNA
atgcaagagatcaagagaatcaacaagatcagaaggagactggtcaaggacagcaacacaaagaaggccggcaagacaggccccatgaaaaccctgctcgtcagagtgatgacccctgacctgagagagcggctggaaaacctgagaaagaagcccgagaacatccctcagcctatcagcaacaccagcagggccaacctgaacaagctgctgaccgactacaccgagatgaagaaagccatcctgcacgtgtactgggaagagttccagaaagaccccgtgggcctgatgagcagagttgctcagcccgctcctaagaacatcgaccagagaaagctgatccccgtgaaggacggcaacgagagactgacctctagcggctttgcctgcagccagtgttgccagcctctgtacgtgtacaagctggaacaagtgaacgacaagggcaagccccacaccaactacttcggcagatgcaacgtgtccgagcacgagaggctgatcctgctgtctcctcacaagcccgaggccaacgatgagctggtcacatacagcctgggcaagttcggacagagagccctggacttctacagcatccacgtgaccagggagagcaatcaccctgtgaagcccctggaacagatcggcggcaatagctgtgcctctggacctgtgggaaaagccctgagcgacgcctgtatgggagccgtggcatccttcctgaccaagtaccaggacatcatcctggaacaccagaaagtgatcaagaagaacgagaaaagactggccaacctcaaggatatcgccagcgctaacggcctggcctttcctaagatcaccctgcctccacagcctcacaccaaagagggcatcgaggcctacaacaacgtggtggcccagatcgtgatttgggtcaacctgaatctgtggcagaagctgaagatcggcagggacgaagccaagccactgcagagactgaagggcttccctagcttccctctggtggaaagacaggccaatgaagtggattggtgggacatggtctgcaacgtgaagaagctgatcaacgagaagaaagaggatggcaaggttttctggcagaacctggccggctacaagagacaagaagccctgaggccttacctgagcagcgaagaggaccggaagaagggcaagaagttcgccagataccagctgggcgacctgctgaagcacctggaaaagaagcacggcgaggactggggcaaagtgtacgatgaggcctgggagagaatcgacaagaaggtggaaggcctgagcaagcacattaagctggaagaggaaagaaggagcgaggacgcccaatctaaagccgctctgaccgattggctgagagccaaggccagctttgtgatcgagggcctgaaagaggccgacaaggacgagttctgcagatgcgagctgaagctgcagaagtggtacggcgatctgagaggcaagcccttcgccattgaggccgagaacagcatcctggacatcagcggcttcagcaagcagtacaactgcgccttcatttggcagaaagacggcgtcaagaaactgaacctgtacctgatcatcaattacttcaaaggcggcaagctgcggttcaagaagatcaaacccgaggccttcgaggctaacagattctacaccgtgatcaacaaaaagtccggcgagatcgtgcccatggaagtgaacttcaacttcgacgaccccaacctgattatcctgcctctggccttcggcaagagacagggcagagagttcatctggaacgatctgctgagcctggaaaccggctctctgaagctggccaatggcagagtgatcgagaaaaccctgtacaacaggagaaccagacaggacgagcctgctctgtttgtggccctgaccttcgagagaagagaggtgctggacagcagcaacatcaagcccatgaacctgatcggcgtggaccggggcgagaatatccctgctgtgatcgccctgacagaccctgaaggatgcccactgagcagattcaaggactccctgggcaaccctacacacatcctgagaatcggcgagagctacaaagagaagcagaggacaatccaggccaagaaagaggtggaacagagaagagccggcggatactctaggaagtacgccagcaaggccaagaatctggccgacgacatggtccgaaacaccgccagagatctgctgtactacgccgtgacacaggacgccatgctgatcttcgagaatctgagcagaggcttcggccggcagggcaagagaacctttatggccgagaggcagtacaccagaatggaagattggctcacagctaaactggcctacgagggactgagcaagacctacctgtccaaaacactggcccagtatacctccaagacctgcagcaattgcggcttcaccatcaccagcgccgactacgacagagtgctggaaaagctcaagaaaaccgccaccggctggatgaccaccatcaacggcaaagagctgaaggttgagggccagatcacctactacaacaggaggaagaggcagaacgtcgtgaaggatctgagcgtggaactggacagactgagcgaagagagcgtgaacaacgacatcagcagctggacaaagggcagatcaggcgaggctctgagcctgctgaagaagaggtttagccacagacctgtgcaagagaagttcgtgtgcctgaactgcggcttcgagacacacgccgatgaacaggctgccctgaacattgccagaagctggctgttcctgagaagccaagagtacaagaagtaccagaccaacaagaccaccggcaacaccgacaagagggcctttgtggaaacctggcagagcttctacagaaaaaagctgaaagaagtctggaagcccgccgtg

SEQ ID NO: 748 - DNA, 2931 bp, synthetic construct
  source 1..2931: mol_type = other DNA
caagagatcaagagaatcaacaagatcagaaggagactggtcaaggacagcaacacaaagaaggccggcaagacaggccccatgaaaaccctgctcgtcagagtgatgacccctgacctgagagagcggctggaaaacctgagaaagaagcccgagaacatccctcagcctatcagcaacaccagcagggccaacctgaacaagctgctgaccgactacaccgagatgaagaaagccatcctgcacgtgtactgggaagagttccagaaagaccccgtgggcctgatgagcagagttgctcagcctgccagcaagaagatcgaccagaacaagctgaagcccgagatggacgagaagggcaatctgaccacagccggctttgcctgctctcagtgtggccagcctctgttcgtgtacaagctggaacaggtgtccgagaaaggcaaggcctacaccaactacttcggcagatgtaacgtggccgagcacgagaagctgattctgctggcccagctgaaacctgagaaggactctgatgaggccgtgacctacagcctgggcaagtttggacagagagccctggacttctacagcatccacgtgaccaaagaaagcacacaccccgtgaagcccctggctcagatcgccggcaatagatacgcctctggacctgtgggcaaagccctgtccgatgcctgcatgggaacaatcgccagcttcctgagcaagtaccaggacatcatcatcgagcaccagaaggtggtcaagggcaaccagaagagactggaaagcctgagggagctggccggcaaagagaacctggaataccccagcgtgaccctgcctcctcagcctcacacaaaagaaggcgtggacgcctacaacgaagtgatcgccagagtgagaatgtgggtcaacctgaacctgtggcagaagctgaaactgtccagggacgacgccaagcctctgctgagactgaagggcttccctagcttccctctggtggaaagacaggccaatgaagtggattggtgggacatggtctgcaacgtgaagaagctgatcaacgagaagaaagaggatggcaaggttttctggcagaacctggccggctacaagagacaagaagccctgaggccttacctgagcagcgaagaggaccggaagaagggcaagaagttcgccagataccagttcggcgacctgctgctgcacctggaaaagaagcacggcgaggactggggcaaagtgtacgatgaggcctgggagagaatcgacaagaaggtggaaggcctgagcaagcacattaagctggaagaggaaagaaggagcgaggacgcccaatctaaagccgctctgaccgattggctgagagccaaggccagctttgtgatcgagggcctgaaagaggccgacaaggacgagttctgcagatgcgagctgaagctgcagaagtggtacggcgatctgagaggcaagcccttcgccattgaggccgagaacagcatcctggacatcagcggcttcagcaagcagtacaactgcgccttcatttggcagaaagacggcgtcaagaaactgaacctgtacctgatcatcaattacttcaaaggcggcaagctgcggttcaagaagatcaaacccgaggccttcgaggctaacagattctacaccgtgatcaacaaaaagtccggcgagatcgtgcccatggaagtgaacttcaacttcgacgaccccaacctgattatcctgcctctggccttcggcaagagacagggcagagagttcatctggaacgatctgctgagcctggaaaccggctctctgaagctggccaatggcagagtgatcgagaaaaccctgtacaacaggagaaccagacaggacgagcctgctctgtttgtggccctgaccttcgagagaagagaggtgctggacagcagcaacatcaagcccatgaacctgatcggcatcgaccggggcgagaatatccctgctgtgatcgccctgacagaccctgaaggatgcccactgagcagattcaaggactccctgggcaaccctacacacatcctgagaatcggcgagagctacaaagagaagcagaggacaatccaggccaagaaagaggtggaacagagaagagccggcggatactctaggaagtacgccagcaaggccaagaatctggccgacgacatggtccgaaacaccgccagagatctgctgtactacgccgtgacacaggacgccatgctgatcttcgagaatctgagcagaggcttcggccggcagggcaagagaacctttatggccgagaggcagtacaccagaatggaagattggctcacagctaaactggcctacgagggactgagcaagacctacctgtccaaaacactggcccagtatacctccaagacctgcagcaattgcggcttcaccatcaccagcgccgactacgacagagtgctggaaaagctcaagaaaaccgccaccggctggatgaccaccatcaacggcaaagagctgaaggttgagggccagatcacctactacaacaggtacaagaggcagaacgtcgtgaaggatctgagcgtggaactggacagactgagcgaagagagcgtgaacaacgacatcagcagctggacaaagggcagatcaggcgaggctctgagcctgctgaagaagaggtttagccacagacctgtgcaagagaagttcgtgtgcctgaactgcggcttcgagacacacgccgatgaacaggctgccctgaacattgccagaagctggctgttcctgagaagccaagagtacaagaagtaccagaccaacaagaccaccggcaacaccgacaagagggcctttgtggaaacctggcagagcttctacagaaaaaagctgaaagaagtctggaagcccgccgtg

SEQ ID NO: 749 - DNA, 2931 bp, synthetic construct
  source 1..2931: mol_type = other DNA
caagagatcaagagaatcaacaagatcagaaggagactggtcaaggacagcaacacaaagaaggccggcaagacaggccccatgaaaaccctgctcgtcagagtgatgacccctgacctgagagagcggctggaaaacctgagaaagaagcccgagaacatccctcagcctatcagcaacaccagcagggccaacctgaacaagctgctgaccgactacaccgagatgaagaaagccatcctgcacgtgtactgggaagagttccagaaagaccccgtgggcctgatgagcagagttgctcagcctgccagcaagaagatcgaccagaacaagctgaagcccgagatggacgagaagggcaatctgaccacagccggctttgcctgctctcagtgtggccagcctctgttcgtgtacaagctggaacaggtgtccgagaaaggcaaggcctacaccaactacttcggcagatgtaacgtggccgagcacgagaagctgattctgctggcccagctgaaacctgagaaggactctgatgaggccgtgacctacagcctgggcaagtttggacagagagccctggacttctacagcatccacgtgaccaaagaaagcacacaccccgtgaagcccctggctcagatcgccggcaatagatacgcctctggacctgtgggcaaagccctgtccgatgcctgcatgggaacaatcgccagcttcctgagcaagtaccaggacatcatcatcgagcaccagaaggtggtcaagggcaaccagaagagactggaaagcctgagggagctggccggcaaagagaacctggaataccccagcgtgaccctgcctcctcagcctcacacaaaagaaggcgtggacgcctacaacgaagtgatcgccagagtgagaatgtgggtcaacctgaacctgtggcagaagctgaaactgtccagggacgacgccaagcctctgctgagactgaagggcttccctagcttccctctggtggaaagacaggccaatgaagtggattggtgggacatggtctgcaacgtgaagaagctgatcaacgagaagaaagaggatggcaaggttttctggcagaacctggccggctacaagagacaagaagccctgaggccttacctgagcagcgaagaggaccggaagaagggcaagaagttcgccagataccagctgggcgacctgctgctgcacctggaaaagaagcacggcgaggactggggcaaagtgtacgatgaggcctgggagagaatcgacaagaaggtggaaggcctgagcaagcacattaagctggaagaggaaagaaggagcgaggacgcccaatctaaagccgctctgaccgattggctgagagccaaggccagctttgtgatcgagggcctgaaagaggccgacaaggacgagttctgcagatgcgagctgaagctgcagaagtggtacggcgatctgagaggcaagcccttcgccattgaggccgagaacagcatcctggacatcagcggcttcagcaagcagtacaactgcgccttcatttggcagaaagacggcgtcaagaaactgaacctgtacctgatcatcaattacttcaaaggcggcaagctgcggttcaagaagatcaaacccgaggccttcgaggctaacagattctacaccgtgatcaacaaaaagtccggcgagatcgtgcccatggaagtgaacttcaacttcgacgaccccaacctgattatcctgcctctggccttcggcaagagacagggcagagagttcatctggaacgatctgctgagcctggaaaccggctctctgaagctggccaatggcagagtgatcgagaaaaccctgtacaacaggagaaccagacaggacgagcctgctctgtttgtggccctgaccttcgagagaagagaggtgctggacagcagcaacatcaagcccatgaacctgatcggcgtggaccggggcgagaatatccctgctgtgatcgccctgacagaccctgaaggatgcccactgagcagattcaaggactccctgggcaaccctacacacatcctgagaatcggcgagagctacaaagagaagcagaggacaatccaggccaagaaagaggtggaacagagaagagccggcggatactctaggaagtacgccagcaaggccaagaatctggccgacgacatggtccgaaacaccgccagagatctgctgtactacgccgtgacacaggacgccatgctgatcttcgagaatctgagcagaggcttcggccggcagggcaagagaacctttatggccgagaggcagtacaccagaatggaagattggctcacagctaaactggcctacgagggactgagcaagacctacctgtccaaaacactggcccagtatacctccaagacctgcagcaattgcggcttcaccatcaccagcgccgactacgacagagtgctggaaaagctcaagaaaaccgccaccggctggatgaccaccatcaacggcaaagagctgaaggttgagggccagatcacctactacaacaggtacaagaggcagaacgtcgtgaaggatctgagcgtggaactggacagactgagcgaagagagcgtgaacaacgacatcagcagctggacaaagggcagatcaggcgaggctctgagcctgctgaagaagaggtttagccacagacctgtgcaagagaagttcgtgtgcctgaactgcggcttcgagacacacgccgatgaacaggctgccctgaacattgccagaagctggctgttcctgagaagccaagagtacaagaagtaccagaccaacaagaccaccggcaacaccgacaagagggcctttgtggaaacctggcagagcttctacagaaaaaagctgaaagaagtctggaagcccgccgtg

SEQ ID NO: 750 - DNA, 2934 bp, synthetic construct
  source 1..2934: mol_type = other DNA
caagagatcaagagaatcaacaagatcagaaggagactggtcaaggacagcaacacaaagaaggccggcaagacaggccccatgaaaaccctgctcgtcagagtgatgacccctgacctgagagagcggctggaaaacctgagaaagaagcccgagaacatccctcagcctatcagcaacaccagcagggccaacctgaacaagctgctgaccgactacaccgagatgaagaaagccatcctgcacgtgtactgggaagagttccagaaagaccccgtgggcctgatgagcagagttgctcagcctgccagcaagaagatcgaccagaacaagctgaagcccgagatggacgagaagggcaatctgaccacagccggctttgcctgctctcagtgtggccagcctctgttcgtgtacaagctggaacaggtgtccgagaaaggcaaggcctacaccaactacttcggcagatgtaacgtggccgagcacgagaagctgattctgctggcccagctgaaacctgagaaggactctgatgaggccgtgacctacagcctgggcaagtttggacagagagccctggacttctacagcatccacgtgaccaaagaaagcacacaccccgtgaagcccctggctcagatcgccggcaatagatacgcctctggacctgtgggcaaagccctgtccgatgcctgcatgggaacaatcgccagcttcctgagcaagtaccaggacatcatcatcgagcaccagaaggtggtcaagggcaaccagaagagactggaaagcctgagggagctggccggcaaagagaacctggaataccccagcgtgaccctgcctcctcagcctcacacaaaagaaggcgtggacgcctacaacgaagtgatcgccagagtgagaatgtgggtcaacctgaacctgtggcagaagctgaaactgtccagggacgacgccaagcctctgctgagactgaagggcttccctagcttccctctggtggaaagacaggccaatgaagtggattggtgggacatggtctgcaacgtgaagaagctgatcaacgagaagaaagaggatggcaaggttttctggcagaacctggccggctacaagagacaagaagccctgaggccttacctgagcagcgaagaggaccggaagaagggcaagaagttcgccagataccagctgggcgacctgctgctgcacctggaaaagaagcacggcgaggactggggcaaagtgtacgatgaggcctgggagagaatcgacaagaaggtggaaggcctgagcaagcacattaagctggaagaggaaagaaggagcgaggacgcccaatctaaagccgctctgaccgattggctgagagccaaggccagctttgtgatcgagggcctgaaagaggccgacaaggacgagttctgcagatgcgagctgaagctgcagaagtggtacggcgatctgagaggcaagcccttcgccattgaggccgagaacagcatcctggacatcagcggcttcagcaagcagtacaactgcgccttcatttggcagaaagacggcgtcaagaaactgaacctgtacctgatcatcaattacttcaaaggcggcaagctgcggttcaagaagatcaaacccgaggccttcgaggctaacagattctacaccgtgatcaacaaaaagtccggcgagatcgtgcccatggaagtgaacttcaacttcgacgaccccaacctgattatcctgcctctggccttcggcaagagacagggcagagagttcatctggaacgatctgctgagcctggaaaccggctctctgaagctggccaatggcagagtgatcgagaaaaccctgtacaacaggagaaccagacaggacgagcctgctctgtttgtggccctgaccttcgagagaagagaggtgctggacagcagcaacatcaagcccatgaacctgatcggcgtggaccggggcgagaatatccctgctgtgatcgccctgacagaccctgaaggatgcccactgagcagattcaaggactccctgggcaaccctacacacatcctgagaatcggcgagagctacaaagagaagcagaggacaatccaggccaagaaagaggtggaacagagaagagccggcggatactctaggaagtacgccagcaaggccaagaatctggccgacgacatggtccgaaacaccgccagagatctgctgtactacgccgtgacacaggacgccatgctgatcttcgagaatctgagcagaggcttcggccggcagggcaagagaacctttatggccgagaggcagtacaccagaatggaagattggctcacagctaaactggcctacgagggactgcccagcaagacctacctgtccaaaacactggcccagtatacctccaagacctgcagcaattgcggcttcaccatcaccagcgccgactacgacagagtgctggaaaagctcaagaaaaccgccaccggctggatgaccaccatcaacggcaaagagctgaaggttgagggccagatcacctactacaacaggtacaagaggcagaacgtcgtgaaggatctgagcgtggaactggacagactgagcgaagagagcgtgaacaacgacatcagcagctggacaaagggcagatcaggcgaggctctgagcctgctgaagaagaggtttagccacagacctgtgcaagagaagttcgtgtgcctgaactgcggcttcgagacacacgccgatgaacaggctgccctgaacattgccagaagctggctgttcctgagaagccaagagtacaagaagtaccagaccaacaagaccaccggcaacaccgacaagagggcctttgtggaaacctggcagagcttctacagaaaaaagctgaaagaagtctggaagcccgccgtg

SEQ ID NO: 751 - DNA, 2934 bp, synthetic construct
  source 1..2934: mol_type = other DNA
caagagatcaagagaatcaacaagatcagaaggagactggtcaaggacagcaacacaaagaaggccggcaagacacggggccccatgaaaaccctgctcgtcagagtgatgacccctgacctgagagagcggctggaaaacctgagaaagaagcccgagaacatccctcagcctatcagcaacaccagcagggccaacctgaacaagctgctgaccgactacaccgagatgaagaaagccatcctgcacgtgtactgggaagagttccagaaagaccccgtgggcctgatgagcagagttgctcagcctgccagcaagaagatcgaccagaacaagctgaagcccgagatggacgagaagggcaatctgaccacagccggctttgcctgctctcagtgtggccagcctctgttcgtgtacaagctggaacaggtgtccgagaaaggcaaggcctacaccaactacttcggcagatgtaacgtggccgagcacgagaagctgattctgctggcccagctgaaacctgagaaggactctgatgaggccgtgacctacagcctgggcaagtttggacagagagccctggacttctacagcatccacgtgaccaaagaaagcacacaccccgtgaagcccctggctcagatcgccggcaatagatacgcctctggacctgtgggcaaagccctgtccgatgcctgcatgggaacaatcgccagcttcctgagcaagtaccaggacatcatcatcgagcaccagaaggtggtcaagggcaaccagaagagactggaaagcctgagggagctggccggcaaagagaacctggaataccccagcgtgaccctgcctcctcagcctcacacaaaagaaggcgtggacgcctacaacgaagtgatcgccagagtgagaatgtgggtcaacctgaacctgtggcagaagctgaaactgtccagggacgacgccaagcctctgctgagactgaagggcttccctagcttccctctggtggaaagacaggccaatgaagtggattggtgggacatggtctgcaacgtgaagaagctgatcaacgagaagaaagaggatggcaaggttttctggcagaacctggccggctacaagagacaagaagccctgaggccttacctgagcagcgaagaggaccggaagaagggcaagaagttcgccagataccagctgggcgacctgctgctgcacctggaaaagaagcacggcgaggactggggcaaagtgtacgatgaggcctgggagagaatcgacaagaaggtggaaggcctgagcaagcacattaagctggaagaggaaagaaggagcgaggacgcccaatctaaagccgctctgaccgattggctgagagccaaggccagctttgtgatcgagggcctgaaagaggccgacaaggacgagttctgcagatgcgagctgaagctgcagaagtggtacggcgatctgagaggcaagcccttcgccattgaggccgagaacagcatcctggacatcagcggcttcagcaagcagtacaactgcgccttcatttggcagaaagacggcgtcaagaaactgaacctgtacctgatcatcaattacttcaaaggcggcaagctgcggttcaagaagatcaaacccgaggccttcgaggctaacagattctacaccgtgatcaacaaaaagtccggcgagatcgtgcccatggaagtgaacttcaacttcgacgaccccaacctgattatcctgcctctggccttcggcaagagacagggcagagagttcatctggaacgatctgctgagcctggaaaccggctctctgaagctggccaatggcagagtgatcgagaaaaccctgtacaacaggagaaccagacaggacgagcctgctctgtttgtggccctgaccttcgagagaagagaggtgctggacagcagcaacatcaagcccatgaacctgatcggcgtggaccggggcgagaatatccctgctgtgatcgccctgacagaccctgaaggatgcccactgagcagattcaaggactccctgggcaaccctacacacatcctgagaatcggcgagagctacaaagagaagcagaggacaatccaggccaagaaagaggtggaacagagaagagccggcggatactctaggaagtacgccagcaaggccaagaatctggccgacgacatggtccgaaacaccgccagagatctgctgtactacgccgtgacacaggacgccatgctgatcttcgagaatctgagcagaggcttcggccggcagggcaagagaacctttatggccgagaggcagtacaccagaatggaagattggctcacagctaaactggcctacgagggactgagcaagacctacctgtccaaaacactggcccagtatacctccaagacctgcagcaattgcggcttcaccatcaccagcgccgactacgacagagtgctggaaaagctcaagaaaaccgccaccggctggatgaccaccatcaacggcaaagagctgaaggttgagggccagatcacctactacaacaggtacaagaggcagaacgtcgtgaaggatctgagcgtggaactggacagactgagcgaagagagcgtgaacaacgacatcagcagctggacaaagggcagatcaggcgaggctctgagcctgctgaagaagaggtttagccacagacctgtgcaagagaagttcgtgtgcctgaactgcggcttcgagacacacgccgatgaacaggctgccctgaacattgccagaagctggctgttcctgagaagccaagagtacaagaagtaccagaccaacaagaccaccggcaacaccgacaagagggcctttgtggaaacctggcagagcttctacagaaaaaagctgaaagaagtctggaagcccgccgtg

SEQ ID NO: 752 - DNA, 2934 bp, synthetic construct; identical to SEQ ID NO: 751
  source 1..2934: mol_type = other DNA

SEQ ID NO: 753 - DNA, 2934 bp, synthetic construct
  source 1..2934: mol_type = other DNA
caagagatcaagagaatcaacaagatcagaaggagactggtcaaggacagcaacacaaagaaggccggcaagacaggccccatgaaaaccctgctcgtcagagtgatgacccctgacctgagagagcggctggaaaacctgagaaagaagcccgagaacatccctcagcctatcagcaacaccagcagggccaacctgaacaagctgctgaccgactacaccgagatgaagaaagccatcctgcacgtgtactgggaagagttccagaaagaccccgtgggcctgatgagcagagttgctcagcctgccagcaagaagatcgaccagaacaagctgaagcccgagatggacgagaagggcaatctgaccacagccggctttgcctgctctcagtgtggccagcctctgttcgtgtacaagctggaacaggtgtccgagaaaggcaaggcctacaccaactacttcggcagatgtaacgtggccgagcacgagaagctgattctgctggcccagctgaaacctgagaaggactctgatgaggccgtgacctacagcctgggcaagtttggacagagagccctggacttctacagcatccacgtgaccaaagaaagcacacaccccgtgaagcccctggctcagatcgccggcaatagatacgcctcttcccctgtgggcaaagccctgtccgatgcctgcatgggaacaatcgccagcttcctgagcaagtaccaggacatcatcatcgagcaccagaaggtggtcaagggcaaccagaagagactggaaagcctgagggagctggccggcaaagagaacctggaataccccagcgtgaccctgcctcctcagcctcacacaaaagaaggcgtggacgcctacaacgaagtgatcgccagagtgagaatgtgggtcaacctgaacctgtggcagaagctgaaactgtccagggacgacgccaagcctctgctgagactgaagggcttccctagcttccctctggtggaaagacaggccaatgaagtggattggtgggacatggtctgcaacgtgaagaagctgatcaacgagaagaaagaggatggcaaggttttctggcagaacctggccggctacaagagacaagaagccctgaggccttacctgagcagcgaagaggaccggaagaagggcaagaagttcgccagataccagctgggcgacctgctgctgcacctggaaaagaagcacggcgaggactggggcaaagtgtacgatgaggcctgggagagaatcgacaagaaggtggaaggcctgagcaagcacattaagctggaagaggaaagaaggagcgaggacgcccaatctaaagccgctctgaccgattggctgagagccaaggccagctttgtgatcgagggcctgaaagaggccgacaaggacgagttctgcagatgcgagctgaagctgcagaagtggtacggcgatctgagaggcaagcccttcgccattgaggccgagaacagcatcctggacatcagcggcttcagcaagcagtacaactgcgccttcatttggcagaaagacggcgtcaagaaactgaacctgtacctgatcatcaattacttcaaaggcggcaagctgcggttcaagaagatcaaacccgaggccttcgaggctaacagattctacaccgtgatcaacaaaaagtccggcgagatcgtgcccatggaagtgaacttcaacttcgacgaccccaacctgattatcctgcctctggccttcggcaagagacagggcagagagttcatctggaacgatctgctgagcctggaaaccggctctctgaagctggccaatggcagagtgatcgagaaaaccctgtacaacaggagaaccagacaggacgagcctgctctgtttgtggccctgaccttcgagagaagagaggtgctggacagcagcaacatcaagcccatgaacctgatcggcgtggaccggggcgagaatatccctgctgtgatcgccctgacagaccctgaaggatgcccactgagcagattcaaggactccctgggcaaccctacacacatcctgagaatcggcgagagctacaaagagaagcagaggacaatccaggccaagaaagaggtggaacagagaagagccggcggatactctaggaagtacgccagcaaggccaagaatctggccgacgacatggtccgaaacaccgccagagatctgctgtactacgccgtgacacaggacgccatgctgatcttcgagaatctgagcagaggcttcggccggcagggcaagagaacctttatggccgagaggcagtacaccagaatggaagattggctcacagctaaactggcctacgagggactgcccagcaagacctacctgtccaaaacactggcccagtatacctccaagacctgcagcaattgcggcttcaccatcaccagcgccgactacgacagagtgctggaaaagctcaagaaaaccgccaccggctggatgaccaccatcaacggcaaagagctgaaggttgagggccagatcacctactacaacaggtacaagaggcagaacgtcgtgaaggatctgagcgtggaactggacagactgagcgaagagagcgtgaacaacgacatcagcagctggacaaagggcagatcaggcgaggctctgagcctgctgaagaagaggtttagccacagacctgtgcaagagaagttcgtgtgcctgaactgcggcttcgagacacacgccgatgaacaggctgccctgaacattgccagaagctggctgttcctgagaagccaagagtacaagaagtaccagaccaacaagaccaccggcaacaccgacaagagggcctttgtggaaacctggcagagcttctacagaaaaaagctgaaagaagtctggaagcccgccgtg

SEQ ID NO: 754 - DNA, 2934 bp, synthetic construct
  source 1..2934: mol_type = other DNA
caagagatcaagagaatcaacaagatcagaaggagactggtcaaggacagcaacacaaagaaggccggcaagacaggccccatgaaaaccctgctcgtcagagtgatgacccctgacctgagagagcggctggaaaacctgagaaagaagcccgagaacatccctcagcctatcagcaacaccagcagggccaacctgaacaagctgctgaccgactacaccgagatgaagaaagccatcctgcacgtgtactgggaagagttccagaaagaccccgtgggcctgatgagcagagttgctcagcctgccagcaagaagatcgaccagaacaagctgaagcccgagatggacgagaagggcaatctgaccacagccggctttgcctgctctcagtgtggccagcctctgttcgtgtacaagctggaacaggtgtccgagaaaggcaaggcctacaccaactacttcggcagatgtaacgtggccgagcacgagaagctgattctgctggcccagctgaaacctgagaaggactctgatgaggccgtgacctacagcctgggcaagtttggacagagagccctggacttctacagcatccacgtgaccaaagaaagcacacaccccgtgaagcccctggctcagatcgccggcaatagatacgcctctacccctgtgggcaaagccctgtccgatgcctgcatgggaacaatcgccagcttcctgagcaagtaccaggacatcatcatcgagcaccagaaggtggtcaagggcaaccagaagagactggaaagcctgagggagctggccggcaaagagaacctggaataccccagcgtgaccctgcctcctcagcctcacacaaaagaaggcgtggacgcctacaacgaagtgatcgccagagtgagaatgtgggtcaacctgaacctgtggcagaagctgaaactgtccagggacgacgccaagcctctgctgagactgaagggcttccctagcttccctctggtggaaagacaggccaatgaagtggattggtgggacatggtctgcaacgtgaagaagctgatcaacgagaagaaagaggatggcaaggttttctggcagaacctggccggctacaagagacaagaagccctgaggccttacctgagcagcgaagaggaccggaagaagggcaagaagttcgccagataccagctgggcgacctgctgctgcacctggaaaagaagcacggcgaggactggggcaaagtgtacgatgaggcctgggagagaatcgacaagaaggtggaaggcctgagcaagcacattaagctggaagaggaaagaaggagcgaggacgcccaatctaaagccgctctgaccgattggctgagagccaaggccagctttgtgatcgagggcctgaaagaggccgacaaggacgagttctgcagatgcgagctgaagctgcagaagtggtacggcgatctgagaggcaagcccttcgccattgaggccgagaacagcatcctggacatcagcggcttcagcaagcagtacaactgcgccttcatttggcagaaagacggcgtcaagaaactgaacctgtacctgatcatcaattacttcaaaggcggcaagctgcggttcaagaagatcaaacccgaggccttcgaggctaacagattctacaccgtgatcaacaaaaagtccggcgagatcgtgcccatggaagtgaacttcaacttcgacgaccccaacctgattatcctgcctctggccttcggcaagagacagggcagagagttcatctggaacgatctgctgagcctggaaaccggctctctgaagctggccaatggcagagtgatcgagaaaaccctgtacaacaggagaaccagacaggacgagcctgctctgtttgtggccctgaccttcgagagaagagaggtgctggacagcagcaacatcaagcccatgaacctgatcggcgtggaccggggcgagaatatccctgctgtgatcgccctgacagaccctgaaggatgcccactgagcagattcaaggactccctgggcaaccctacacacatcctgagaatcggcgagagctacaaagagaagcagaggacaatccaggccaagaaagaggtggaacagagaagagccggcggatactctaggaagtacgccagcaaggccaagaatctggccgacgacatggtccgaaacaccgccagagatctgctgtactacgccgtgacacaggacgccatgctgatcttcgagaatctgagcagaggcttcggccggcagggcaagagaacctttatggccgagaggcagtacaccagaatggaagattggctcacagctaaactggcctacgagggactgcccagcaagacctacctgtccaaaacactggcccagtatacctccaagacctgcagcaattgcggcttcaccatcaccagcgccgactacgacagagtgctggaaaagctcaagaaaaccgccaccggctggatgaccaccatcaacggcaaagagctgaaggttgagggccagatcacctactacaacaggtacaagaggcagaacgtcgtgaaggatctgagcgtggaactggacagactgagcgaagagagcgtgaacaacgacatcagcagctggacaaagggcagatcaggcgaggctctgagcctgctgaagaagaggtttagccacagacctgtgcaagagaagttcgtgtgcctgaactgcggcttcgagacacacgccgatgaacaggctgccctgaacattgccagaagctggctgttcctgagaagccaagagtacaagaagtaccagaccaacaagaccaccggcaacaccgacaagagggcctttgtggaaacctggcagagcttctacagaaaaaagctgaaagaagtctggaagcccgccgtg

SEQ ID NO: 755 - DNA, 2934 bp, synthetic construct
  source 1..2934: mol_type = other DNA
caagagatcaagagaatcaacaagatcagaaggagactggtcaaggacagcaacacaaagaaggccggcaagacaggccccatgaaaaccctgctcgtcagagtgatgacccctgacctgagagagcggctggaaaacctgagaaagaagcccgagaacatccctcagcctatcagcaacaccagcagggccaacctgaacaagctgctgaccgactacaccgagatgaagaaagccatcctgcacgtgtactgggaagagttccagaaagaccccgtgggcctgatgagcagagttgctcagcctgccagcaagaagatcgaccagaacaagctgaagcccgagatggacgagaagggcaatctgaccacagccggctttgcctgctctcagtgtggccagcctctgttcgtgtacaagctggaacaggtgtccgagaaaggcaaggcctacaccaactacttcggcagatgtaacgtggccgagcacgagaagctgattctgctggcccagctgaaacctgagaaggactctgatgaggccgtgacctacagcctgggcaagtttggacagagagccctggacttctacagcatccacgtgaccaaagaaagcacacaccccgtgaagcccctggctcagatcgccggcaatagatacgcctctgcccctgtgggcaaagccctgtccgatgcctgcatgggaacaatcgccagcttcctgagcaagtaccaggacatcatcatcgagcaccagaaggtggtcaagggcaaccagaagagactggaaagcctgagggagctggccggcaaagagaacctggaataccccagcgtgaccctgcctcctcagcctcacacaaaagaaggcgtggacgcctacaacgaagtgatcgccagagtgagaatgtgggtcaacctgaacctgtggcagaagctgaaactgtccagggacgacgccaagcctctgctgagactgaagggcttccctagcttccctctggtggaaagacaggccaatgaagtggattggtgggacatggtctgcaacgtgaagaagctgatcaacgagaagaaagaggatggcaaggttttctggcagaacctggccggctacaagagacaagaagccctgaggccttacctgagcagcgaagaggaccggaagaagggcaagaagttcgccagataccagctgggcgacctgctgctgcacctggaaaagaagcacggcgaggactggggcaaagtgtacgatgaggcctgggagagaatcgacaagaaggtggaaggcctgagcaagcacattaagctggaagaggaaagaaggagcgaggacgcccaatctaaagccgctctgaccgattggctgagagccaaggccagctttgtgatcgagggcctgaaagaggccgacaaggacgagttctgcagatgcgagctgaagctgcagaagtggtacggcgatctgagaggcaagcccttcgccattgaggccgagaacagcatcctggacatcagcggcttcagcaagcagtacaactgcgccttcatttggcagaaagacggcgtcaagaaactgaacctgtacctgatcatcaattacttcaaaggcggcaagctgcggttcaagaagatcaaacccgaggccttcgaggctaacagattctacaccgtgatcaacaaaaagtccggcgagatcgtgcccatggaagtgaacttcaacttcgacgaccccaacctgattatcctgcctctggccttcggcaagagacagggcagagagttcatctggaacgatctgctgagcctggaaaccggctctctgaagctggccaatggcagagtgatcgagaaaaccctgtacaacaggagaaccagacaggacgagcctgctctgtttgtggccctgaccttcgagagaagagaggtgctggacagcagcaacatcaagcccatgaacctgatcggcgtggaccggggcgagaatatccctgctgtgatcgccctgacagaccctgaaggatgcccactgagcagattcaaggactccctgggcaaccctacacacatcctgagaatcggcgagagctacaaagagaagcagaggacaatccaggccaagaaagaggtggaacagagaagagccggcggatactctaggaagtacgccagcaaggccaagaatctggccgacgacatggtccgaaacaccgccagagatctgctgtactacgccgtgacacaggacgccatgctgatcttcgagaatctgagcagaggcttcggccggcagggcaagagaacctttatggccgagaggcagtacaccagaatggaagattggctcacagctaaactggcctacgagggactgcccagcaagacctacctgtccaaaacactggcccagtatacctccaagacctgcagcaattgcggcttcaccatcaccagcgccgactacgacagagtgctggaaaagctcaagaaaaccgccaccggctggatgaccaccatcaacggcaaagagctgaaggttgagggccagatcacctactacaacaggtacaagaggcagaacgtcgtgaaggatctgagcgtggaactggacagactgagcgaagagagcgtgaacaacgacatcagcagctggacaaagggcagatcaggcgaggctctgagcctgctgaagaagaggtttagccacagacctgtgcaagagaagttcgtgtgcctgaactgcggcttcgagacacacgccgatgaacaggctgccctgaacattgccagaagctggctgttcctgagaagccaagagtacaagaagtaccagaccaacaagaccaccggcaacaccgacaagagggcctttgtggaaacctggcagagcttctacagaaaaaagctgaaagaagtctggaagcccgccgtg

SEQ ID NO: 756 - DNA, 2934 bp, synthetic construct
  source 1..2934: mol_type = other DNA
caagagatcaagagaatcaacaagatcagaaggagactggtcaaggacagcaacacaaagaaggccggcaagacaggccccatgaaaaccctgctcgtcagagtgatgacccctgacctgagagagcggctggaaaacctgagaaagaagcccgagaacatccctcagcctatcagcaacaccagcagggccaacctgaacaagctgctgaccgactacaccgagatgaagaaagccatcctgcacgtgtactgggaagagttccagaaagaccccgtgggcctgatgagcagagttgctcagcctgccagcaagaagatcgaccagaacaagctgaagcccgagatggacgagaagggcaatctgaccacagccggctttgcctgctctcagtgtggccagcctctgttcgtgtacaagctggaacaggtgtccgagaaaggcaaggcctacaccaactacttcggcagatgtaacgtggccgagcacgagaagctgattaagctggcccagctgaaacctgagaaggactctgatgaggccgtgacctacagcctgggcaagtttggacagagagccctggacttctacagcatccacgtgaccaaagaaagcacacaccccgtgaagcccctggctcagatcgccggcaatagatacgcctctggacctgtgggcaaagccctgtccgatgcctgcatgggaacaatcgccagcttcctgagcaagtaccaggacatcatcatcgagcaccagaaggtggtcaagggcaaccagaagagactggaaagcctgagggagctggccggcaaagagaacctggaataccccagcgtgaccctgcctcctcagcctcacacaaaagaaggcgtggacgcctacaacgaagtgatcgccagagtgagaatgtgggtcaacctgaacctgtggcagaagctgaaactgtccagggacgacgccaagcctctgctgagactgaagggcttccctagcttccctctggtggaaagacaggccaatgaagtggattggtgggacatggtctgcaacgtgaagaagctgatcaacgagaagaaagaggatggcaaggttttctggcagaacctggccggctacaagagacaagaagccctgaggccttacctgagcagcgaagaggaccggaagaagggcaagaagttcgccagataccagctgggcgacctgctgctgcacctggaaaagaagcacggcgaggactggggcaaagtgtacgatgaggcctgggagagaatcgacaagaaggtggaaggcctgagcaagcacattaagctggaagaggaaagaaggagcgaggacgcccaatctaaagccgctctgaccgattggctgagagccaaggccagctttgtgatcgagggcctgaaagaggccgacaaggacgagttctgcagatgcgagctgaagctgcagaagtggtacggcgatctgagaggcaagcccttcgccattgaggccgagaacagcatcctggacatcagcggcttcagcaagcagtacaactgcgccttcatttggcagaaagacggcgtcaagaaactgaacctgtacctgatcatcaattacttcaaaggcggcaagctgcggttcaagaagatcaaacccgaggccttcgaggctaacagattctacaccgtgatcaacaaaaagtccggcgagatcgtgcccatggaagtgaacttcaacttcgacgaccccaacctgattatcctgcctctggccttcggcaagagacagggcagagagttcatctggaacgatctgctgagcctggaaaccggctctctgaagctggccaatggcagagtgatcgagaaaaccctgtacaacaggagaaccagacaggacgagcctgctctgtttgtggccctgaccttcgagagaagagaggtgctggacagcagcaacatcaagcccatgaacctgatcggcgtggaccggggcgagaatatccctgctgtgatcgccctgacagaccctgaaggatgcccactgagcagattcaaggactccctgggcaaccctacacacatcctgagaatcggcgagagctacaaagagaagcagaggacaatccaggccaagaaagaggtggaacagagaagagccggcggatactctaggaagtacgccagcaaggccaagaatctggccgacgacatggtccgaaacaccgccagagatctgctgtactacgccgtgacacaggacgccatgctgatcttcgagaatctgagcagaggcttcggccggcagggcaagagaacctttatggccgagaggcagtacaccagaatggaagattggctcacagctaaactggcctacgagggactgcccagcaagacctacctgtccaaaacactggcccagtatacctccaagacctgcagcaattgcggcttcaccatcaccagcgccgactacgacagagtgctggaaaagctcaagaaaaccgccaccggctggatgaccaccatcaacggcaaagagctgaaggttgagggccagatcacctactacaacaggtacaagaggcagaacgtcgtgaaggatctgagcgtggaactggacagactgagcgaagagagcgtgaacaacgacatcagcagctggacaaagggcagatcaggcgaggctctgagcctgctgaagaagaggtttagccacagacctgtgcaagagaagttcgtgtgcctgaactgcggcttcgagacacacgccgatgaacaggctgccctgaacattgccagaagctggctgttcctgagaagccaagagtacaagaagtaccagaccaacaagaccaccggcaacaccgacaagagggcctttgtggaaacctggcagagcttctacagaaaaaagctgaaagaagtctggaagcccgccgtg

SEQ ID NO: 757 - DNA, 2931 bp, synthetic construct
  source 1..2931: mol_type = other DNA
caagagatcaagagaatcaacaagatcagaaggagactggtcaaggacagcaacacaaagaaggccggcaagacaggccccatgaaaaccctgctcgtcagagtgatgacccctgacctgagagagcggctggaaaacctgagaaagaagcccgagaacatccctcagcctatcagcaacaccagcagggccaacctgaacaagctgctgaccgactacaccgagatgaagaaagccatcctgcacgtgtactgggaagagttccagaaagaccccgtgggcctgatgagcagagttgctcagcctgccagcaagaagatcgaccagaacaagctgaagcccgagatggacgagaagggcaatctgaccacagccggctttgcctgctctcagtgtggccagcctctgttcgtgtacaagctggaacaggtgtccgagaaaggcaaggcctacaccaactacttcggcagatgtaacgtggccgagcacgagaagctgattctgctggcccagctgaaacctgagaaggactctgatgaggccgtgacctacagcctgggcaagtttggacagagagccctggacttctacagcatccacgtgaccaaagaaagcacacaccccgtgaagcccctggctcagatcgccggcaatagatacgcctctggacctgtgggcaaagccctgtccgatgcctgcatgggaacaatcgccagcttcctgagcaagtaccaggacatcatcatcgagcaccagaaggtggtcaagggcaaccagaagagactggaaagcctgagggagctggccggcaaagagaacctggaataccccagcgtgaccctgcctcctcagcctcacacaaaagaaggcgtggacgcctacaacgaagtgatcgccagagtgagaatgtgggtcaacctgaacctgtggcagaagctgaaactgtccagggacgacgccaagcctctgctgagactgaagggcttccctagcttccctctggtggaaagacaggccaatgaagtggattggtgggacatggtctgcaacgtgaagaagctgatcaacgagaagaaagaggatggcaaggttttctggcagaacctggccggctacaagagacaagaagccctgaggccttacctgagcagccccgaggaccggaagaagggcaagaagttcgccagataccagttcggcgacctgctgctgcacctggaaaagaagcacggcgaggactggggcaaagtgtacgatgaggcctgggagagaatcgacaagaaggtggaaggcctgagcaagcacattaagctggaagaggaaagaaggagcgaggacgcccaatctaaagccgctctgaccgattggctgagagccaaggccagctttgtgatcgagggcctgaaagaggccgacaaggacgagttctgcagatgcgagctgaagctgcagaagtggtacggcgatctgagaggcaagcccttcgccattgaggccgagaacagcatcctggacatcagcggcttcagcaagcagtacaactgcgccttcatttggcagaaagacggcgtcaagaaactgaacctgtacctgatcatcaattacttcaaaggcggcaagctgcggttcaagaagatcaaacccgaggccttcgaggctaacagattctacaccgtgatcaacaaaaagtccggcgagatcgtgcccatggaagtgaacttcaacttcgacgaccccaacctgattatcctgcctctggccttcggcaagagacagggcagagagttcatctggaacgatctgctgagcctggaaaccggctctctgaagctggccaatggcagagtgatcgagaaaaccctgtacaacaggagaaccagacaggacgagcctgctctgtttgtggccctgaccttcgagagaagagaggtgctggacagcagcaacatcaagcccatgaacctgatcggcgtggaccggggcgagaatatccctgctgtgatcgccctgacagaccctgaaggatgcccactgagcagattcaaggactccctgggcaaccctacacacatcctgagaatcggcgagagctacaaagagaagcagaggacaatccaggccaagaaagaggtggaacagagaagagccggcggatactctaggaagtacgccagcaaggccaagaatctggccaacgacatggtccgaaacaccgccagagatctgctgtactacgccgtgacacaggacgccatgctgatcttcgagaatctgagcagaggcttcggccggcagggcaagagaacctttatggccgagaggcagtacaccagaatggaagattggctcacagctaaactggcctacgagggactgagcaagacctacctgtccaaaacactggcccagtatacctccaagacctgcagcaattgcggcttcaccatcaccagcgccgactacgacagagtgctggaaaagctcaagaaaaccgccaccggctggatgaccaccatcaacggcaaagagctgaaggttgagggccagatcacctactacaacaggaggaagaggcagaacgtcgtgaaggatctgagcgtggaactggacagactgagcgaagagagcgtgaacaacgacatcagcagctggacaaagggcagatcaggcgaggctctgagcctgctgaagaagaggtttagccacagacctgtgcaagagaagttcgtgtgcctgaactgcggcttcgagacacacgccgatgaacaggctgccctgaacattgccagaagctggctgttcctgagaagccaagagtacaagaagtaccagaccaacaagaccaccggcaacaccgacaagagggcctttgtggaaacctggcagagcttctacagaaaaaagctgaaagaagtctggaagcccgccgtg

SEQ ID NO: 758 - DNA, 2931 bp, synthetic construct
  source 1..2931: mol_type = other DNA
caagagatcaagagaatcaacaagatcagaaggagactggtcaaggacagcaacacaaagaaggccggcaagacaggccccatgaaaaccctgctcgtcagagtgatgacccctgacctgagagagcggctggaaaacctgagaaagaagcccgagaacatccctcagcctatcagcaacaccagcagggccaacctgaacaagctgctgaccgactacaccgagatgaagaaagccatcctgcacgtgtactgggaagagttccagaaagaccccgtgggcctgatgagcagagttgctcagcctgccagcaagaagatcgaccagaacaagctgaagcccgagatggacgagaagggcaatctgaccacagccggctttgcctgctctcagtgtggccagcctctgttcgtgtacaagctggaacaggtgtccgagaaaggcaaggcctacaccaactacttcggcagatgtaacgtggccgagcacgagaagctgattctgctggcccagctgaaacctgagaaggactctgatgaggccgtgacctacagcctgggcaagtttggacagagagccctggacttctacagcatccacgtgaccaaagaaagcacacaccccgtgaagcccctggctcagatcgccggcaatagatacgcctctggacctgtgggcaaagccctgtccgatgcctgcatgggaacaatcgccagcttcctgagcaagtaccaggacatcatcatcgagcaccagaaggtggtcaagggcaaccagaagagactggaaagcctgagggagctggccggcaaagagaacctggaataccccagcgtgaccctgcctcctcagcctcacacaaaagaaggcgtggacgcctacaacgaagtgatcgccagagtgagaatgtgggtcaacctgaacctgtggcagaagctgaaactgtccagggacgacgccaagcctctgctgagactgaagggcttccctagcttccctctggtggaaagacaggccaatgaagtggattggtgggacatggtctgcaacgtgaagaagctgatcaacgagaagaaagaggatggcaaggttttctggcagaacctggccggctacaagagacaagaagccctgaggccttacctgagcagcgaagaggaccggaagaagggcaagaagttcgccagataccagctgggcgacctgctgctgcacctggaaaagaagcacggcgaggactggggcaaagtgtacgatgaggcctgggagagaatcgacaagaaggtggaaggcctgagcaagcacattaagctggaagaggaaagaaggagcgaggacgcccaatctaaagccgctctgaccgattggctgagagccaaggccagctttgtgatcgagggcctgaaagaggccgacaaggacgagttcagcagatgcgagctgaagctgcagaagtggtacggcgatctgagaggcaagcccttcgccattgaggccgagaacagcatcctggacatcagcggcttcagcaagcagtacaactgcgccttcatttggcagaaagacggcgtcaagaaactgaacctgtacctgatcatcaattacttcaaaggcggcaagctgcggttcaagaagatcaaacccgaggccttcgaggctaacagattctacaccgtgatcaacaaaaagtccggcgagatcgtgcccatggaagtgaacttcaacttcgacgaccccaacctgattatcctgcctctggccttcggcaagagacagggcagagagttcatctggaacgatctgctgagcctggaaaccggctctctgaagctggccaatggcagagtgatcgagaaaaccctgtacaacaggagaaccagacaggacgagcctgctctgtttgtggccctgaccttcgagagaagagaggtgctggacagcagcaacatcaagcccatgaacctgatcggcgtggaccggggcgagaatatccctgctgtgatcgccctgacagaccctgaaggatgcccactgagcagattcaaggactccctgggcaaccctacacacatcctgagaatcggcgagagctacaaagagaagcagaggacaatccaggccaagaaagaggtggaacagagaagagccggcggatactctaggaagtacgccagcaaggccaagaatctggccgacgacatggtccgaaacaccgccagagatctgctgtactacgccgtgacacaggacgccatgctgatcttcgagaatctgagcagaggcttcggccggcagggcaagagaacctttatggccgagaggcagtacaccagaatggaagattggctcacagctaaactggcctacgagggactgagcaagacctacctgtccaaaacactggcccagtatacctccaagacctgcagcaattgcggcttcaccatcaccagcgccgactacgacagagtgctggaaaagctcaagaaaaccgccaccggctggatgaccaccatcaacggcaaagagctgaaggttgagggccagatcacctactacaacaggaggaagaggcagaacgtcgtgaaggatctgagcgtggaactggacagactgagcgaagagagcgtgaacaacgacatcagcagctggacaaagggcagatcaggcgaggctctgagcctgctgaagaagaggtttagccacagacctgtgcaagagaagttcgtgtgcctgaactgcggcttcgagacacacgccgatgaacaggctgccctgaacattgccagaagctggctgttcctgagaagccaagagtacaagaagtaccagaccaacaagaccaccggcaacaccgacaagagggcctttgtggaaacctggcagagcttctacagaaaaaagctgaaagaagtctggaagcccgccgtg

SEQ ID NO: 759 - DNA, 2931 bp, synthetic construct
  source 1..2931: mol_type = other DNA
caagagatcaagagaatcaacaagatcagaaggagactggtcaaggacagcaacacaaagaaggccggcaagacaggccccatgaaaaccctgctcgtcagagtgatgacccctgacctgagagagcggctggaaaacctgagaaagaagcccgagaacatccctcagcctatcagcaacaccagcagggccaacctgaacaagctgctgaccgactacaccgagatgaagaaagccatcctgcacgtgtactgggaagagttccagaaagaccccgtgggcctgatgagcagagttgctcagcctgccagcaagaagatcgaccagaacaagctgaagcccgagatggacgagaagggcaatctgaccacagccggctttgcctgctctcagtgtggccagcctctgttcgtgtacaagctggaacaggtgtccgagaaaggcaaggcctacaccaactacttcggcagatgtaacgtggccgagcacgagaagctgattctgctggcccagctgaaacctgagaaggactctgatgaggccgtgacctacagcctgggcaagtttggacagagagccctggacttctacagcatccacgtgaccaaagaaagcacacaccccgtgaagcccctggctcagatcgccggcaatagatacgcctctggacctgtgggcaaagccctgtccgatgcctgcatgggaacaatcgccagcttcctgagcaagtaccaggacatcatcatcgagcaccagaaggtggtcaagggcaaccagaagagactggaaagcctgagggagctggccggcaaagagaacctggaataccccagcgtgaccctgcctcctcagcctcacacaaaagaaggcgtggacgcctacaacgaagtgatcgccagagtgagaatgtgggtcaacctgaacctgtggcagaagctgaaactgtccagggacgacgccaagcctctgctgagactgaagggcttccctagcttccctctggtggaaagacaggccaatgaagtggattggtgggacatggtctgcaacgtgaagaagctgatcaacgagaagaaagaggatggcaaggttttctggcagaacctggccggctacaagagacaagaagccctgaggccttacctgagcagcgaaaacgaccggaagaagggcaagaagttcgccagataccagttcggcgacctgctgaagcacctggaaaagaagcacggcgaggactggggcaaagtgtacgatgaggcctgggagagaatcgacaagaaggtggaaggcctgagcaagcacattaagctggaagaggaaagaaggagcgaggacgcccaatctaaagccgctctgaccgattggctgagagccaaggccagctttgtgatcgagggcctgaaagaggccgacaaggacgagttcagcagatgcgagctgaagctgcagaagtggtacggcgatctgagaggcaagcccttcgccattgaggccgagaacagcatcctggacatcagcggcttcagcaagcagtacaactgcgccttcatttggcagaaagacggcgtcaagaaactgaacctgtacctgatcatcaattacttcaaaggcggcaagctgcggttcaagaagatcaaacccgaggccttcgaggctaacagattctacaccgtgatcaacaaaaagtccggcgagatcgtgcccatggaagtgaacttcaacttcgacgaccccaacctgattatcctgcctctggccttcggcaagagacagggcagagagttcatctggaacgatctgctgagcctggaaaccggctctctgaagctggccaatggcagagtgatcgagaaaaccctgtacaacaggagaaccagacaggacgagcctgctctgtttgtggccctgaccttcgagagaagagaggtgctggacagcagcaacatcaagcccatgaacctgatcggcgtggaccggggcgagaatatccctgctgtgatcgccctgacagaccctgaaggatgcccactgagcagattcaaggactccctgggcaaccctacacacatcctgagaatcggcgagagctacaaagagaagcagaggacaatccaggccaagaaagaggtggaacagagaagagccggcggatactctaggaagtacgccagcaaggccaagaatctggccgacgacatggtccgaaacaccgccagagatctgctgtactacgccgtgacacaggacgccatgctgatcttcgagaatctgagcagaggcttcggccggcagggcaagagaacctttatggccgagaggcagtacaccagaatggaagattggctcacagctaaactggcctacgagggactgagcaagaccctgctgtccaaaacactggcccagtatacctccaagacctgcagcaattgcggcttcaccatcaccagcgccgactacgacagagtgctggaaaagctcaagaaaaccgccaccggctggatgaccaccatcaacggcaaagagctgaaggttgagggccagatcacctactacaacaggaggaagaggcagaacgtcgtgaaggatctgagcgtggaactggacagactgagcgaagagagcgtgaacaacgacatcagcagctggacaaagggcagatcaggcgaggctctgagcctgctgaagaagaggtttagccacagacctgtgcaagagaagttcgtgtgcctgaactgcggcttcgagacacacgccgatgaacaggctgccctgaacattgccagaagctggctgttcctgagaagccaagagtacaagaagtaccagaccaacaagaccaccggcaacaccgacaagagggcctttgtggaaacctggcagagcttctacagaaaaaagctgaaagaagtctggaagcccgccgtg

SEQ ID NO: 760 - DNA, 2931 bp, synthetic construct
  source 1..2931: mol_type = other DNA
caagagatcaagagaatcaacaagatcagaaggagactggtcaaggacagcaacacaaagaaggccggcaagacaggccccatgaaaaccctgctcgtcagagtgatgacccctgacctgagagagcggctggaaaacctgagaaagaagcccgagaacatccctcagcctatcagcaacaccagcagggccaacctgaacaagctgctgaccgactacaccgagatgaagaaagccatcctgcacgtgtactgggaagagttccagaaagaccccgtgggcctgatgagcagagttgctcagcctgccagcaagaagatcgaccagaacaagctgaagcccgagatggacgagaagggcaatctgaccacagccggctttgcctgctctcagtgtggccagcctctgttcgtgtacaagctggaacaggtgtccgagaaaggcaaggcctacaccaactacttcggcagatgtaacgtggccgagcacgagaagctgattctgctggcccagctgaaacctgagaaggactctgatgaggccgtgacctacagcctgggcaagtttggacagagagccctggacttctacagcatccacgtgaccaaagaaagcacacaccccgtgaagcccctggctcagatcgccggcaatagatacgcctctggacctgtgggcaaagccctgtccgatgcctgcatgggaacaatcgccagcttcctgagcaagtaccaggacatcatcatcgagcaccagaaggtggtcaagggcaaccagaagagactggaaagcctgagggagctggccggcaaagagaacctggaataccccagcgtgaccctgcctcctcagcctcacacaaaagaaggcgtggacgcctacaacgaagtgatcgccagagtgagaatgtgggtcaacctgaacctgtggcagaagctgaaactgtccagggacgacgccaagcctctgctgagactgaagggcttccctagcttccctctggtggaaagacaggccaatgaagtggattggtgggacatggtctgcaacgtgaagaagctgatcaacgagaagaaagaggatggcaaggttttctggcagaacctggccggctacaagagacaagaagccctgaggccttacctgagcagccccgaggaccggaagaagggcaagaagttcgccagataccagctgggcgacctgctgctgcacctggaaaagaagcacggcgaggactggggcaaagtgtacgatgaggcctgggagagaatcgacaagaaggtggaaggcctgagcaagcacattaagctggaagaggaaagaaggagcgaggacgcccaatctaaagccgctctgaccgattggctgagagccaaggccagctttgtgatcgagggcctgaaagaggccgacaaggacgagttctgcagatgcgagctgaagctgcagaagtggtacggcgatctgagaggcaagcccttcgccattgaggccgagaacagcatcctggacatcagcggcttcagcaagcagtacaactgcgccttcatttggcagaaagacggcgtcaagaaactgaacctgtacctgatcatcaattacttcaaaggcggcaagctgcggttcaagaagatcaaacccgaggccttcgaggctaacagattctacaccgtgatcaacaaaaagtccggcgagatcgtgcccatggaagtgaacttcaacttcgacgaccccaacctgattatcctgcctctggccttcggcaagagacagggcagagagttcatctggaacgatctgctgagcctggaaaccggctctctgaagctggccaatggcagagtgatcgagaaaaccctgtacaacaggagaaccagacaggacgagcctgctctgtttgtggccctgaccttcgagagaagagaggtgctggacagcagcaacatcaagcccatgaacctgatcggcgtggaccggggcgagaatatccctgctgtgatcgccctgacagaccctgaaggatgcccactgagcagattcaaggactccctgggcaaccctacacacatcctgagaatcggcgagagctacaaagagaagcagaggacaatccaggccaagaaagaggtggaacagagaagagccggcggatactctaggaagtacgccagcaaggccaagaatctggccaacgacatggtccgaaacaccgccagagatctgctgtactacgccgtgacacaggacgccatgctgatcttcgagaatctgagcagaggcttcggccggcagggcaagagaacctttatggccgagaggcagtacaccagaatggaagattggctcacagctaaactggcctacgagggactgagcaagacctacctgtccaaaacactggcccagtatacctccaagacctgcagcaattgcggcttcaccatcaccagcgccgactacgacagagtgctggaaaagctcaagaaaaccgccaccggctggatgaccaccatcaacggcaaagagctgaaggttgagggccagatcacctactacaacaggaggaagaggcagaacgtcgtgaaggatctgagcgtggaactggacagactgagcgaagagagcgtgaacaacgacatcagcagctggacaaagggcagatcaggcgaggctctgagcctgctgaagaagaggtttagccacagacctgtgcaagagaagttcgtgtgcctgaactgcggcttcgagacacacgccgatgaacaggctgccctgaacattgccagaagctggctgttcctgagaagccaagagtacaagaagtaccagaccaacaagaccaccggcaacaccgacaagagggcctttgtggaaacctggcagagcttctacagaaaaaagctgaaagaagtctggaagcccgccgtg

SEQ ID NO: 761 - DNA, 2931 bp, synthetic construct
  source 1..2931: mol_type = other DNA
caagagatcaagagaatcaacaagatcagaaggagactggtcaaggacagcaacacaaagaaggccggcaagacaggccccatgaaaaccctgctcgtcagagtgatgacccctgacctgagagagcggctggaaaacctgagaaagaagcccgagaacatccctcagcctatcagcaacaccagcagggccaacctgaacaagctgctgaccgactacaccgagatgaagaaagccatcctgcacgtgtactgggaagagttccagaaagaccccgtgggcctgatgagcagagttgctcagcctgccagcaagaagatcgaccagaacaagctgaagcccgagatggacgagaagggcaatctgaccacagccggctttgcctgctctcagtgtggccagcctctgttcgtgtacaagctggaacaggtgtccgagaaaggcaaggcctacaccaactacttcggcagatgtaacgtggccgagcacgagaagctgattctgctggcccagctgaaacctgagaaggactctgatgaggccgtgacctacagcctgggcaagtttggacagagagccctggacttctacagcatccacgtgaccaaagaaagcacacaccccgtgaagcccctggctcagatcgccggcaatagatacgcctctggacctgtgggcaaagccctgtccgatgcctgcatgggaacaatcgccagcttcctgagcaagtaccaggacatcatcatcgagcaccagaaggtggtcaagggcaaccagaagagactggaaagcctgagggagctggccggcaaagagaacctggaataccccagcgtgaccctgcctcctcagcctcacacaaaagaaggcgtggacgcctacaacgaagtgatcgccagagtgagaatgtgggtcaacctgaacctgtggcagaagctgaaactgtccagggacgacgccaagcctctgctgagactgaagggcttccctagcttccctctggtggaaagacaggccaatgaagtggattggtgggacatggtctgcaacgtgaagaagctgatcaacgagaagaaagaggatggcaaggttttctggcagaacctggccggctacaagagacaagaagccctgaggccttacctgagcagccccgaggaccggaagaagggcaagaagttcgccagataccagctgggcgacctgctgctgcacctggaaaagaagcacggcgaggactggggcaaagtgtacgatgaggcctgggagagaatcgacaagaaggtggaaggcctgagcaagcacattaagctggaagaggaaagaaggagcgaggacgcccaatctaaagccgctctgaccgattggctgagagccaaggccagctttgtgatcgagggcctgaaagaggccgacaaggacgagttctgcagatgcgagctgaagctgcagaagtggtacggcgatctgagaggcaagcccttcgccattgaggccgagaacagcatcctggacatcagcggcttcagcaagcagtacaactgcgccttcatttggcagaaagacggcgtcaagaaactgaacctgtacctgatcatcaattacttcaaaggcggcaagctgcggttcaagaagatcaaacccgaggccttcgaggctaacagattctacaccgtgatcaacaaaaagtccggcgagatcgtgcccatggaagtgaacttcaacttcgacgaccccaacctgattatcctgcctctggccttcggcaagagacagggcagagagttcatctggaacgatctgctgagcctggaaaccggctctctgaagctggccaatggcagagtgatcgagaaacccctgtacaacaggagaaccagacaggacgagcctgctctgtttgtggccctgaccttcgagagaagagaggtgctggacagcagcaacatcaagcccatgaacctgatcggcgtggaccggggcgagaatatccctgctgtgatcgccctgacagaccctgaaggatgcccactgagcagattcaaggactccctgggcaaccctacacacatcctgagaatcggcgagagctacaaagagaagcagaggacaatccaggccaagaaagaggtggaacagagaagagccggcggatactctaggaagtacgccagcaaggccaagaatctggccgacgacatggtccgaaacaccgccagagatctgctgtactacgccgtgacacaggacgccatgctgatcttcgagaatctgagcagaggcttcggccggcagggcaagagaacctttatggccgagaggcagtacaccagaatggaagattggctcacagctaaactggcctacgagggactgagcaagacctacctgtccaaaacactggcccagtatacctccaagacctgcagcaattgcggcttcaccatcaccagcgccgactacgacagagtgctggaaaagctcaagaaaaccgccaccggctggatgaccaccatcaacggcaaagagctgaaggttgagggccagatcacctactacaacaggaggaagaggcagaacgtcgtgaaggatctgagcgtggaactggacagactgagcgaagagagcgtgaacaacgacatcagcagctggacaaagggcagatcaggcgaggctctgagcctgctgaagaagaggtttagccacagacctgtgcaagagaagttcgtgtgcctgaactgcggcttcgagacacacgccgatgaacaggctgccctgaacattgccagaagctggctgttcctgagaagccaagagtacaagaagtaccagaccaacaagaccaccggcaacaccgacaagagggcctttgtggaaacctggcagagcttctacagaaaaaagctgaaagaagtctggaagcccgccgtg

SEQ ID NO: 762 - DNA, 2937 bp, synthetic construct
  source 1..2937: mol_type = other DNA
caagagatcaagagaatcaacaagatcagaaggagactggtcaaggacagcaacacaaagaaggccggcaagacacggggccccatgaaaaccctgctcgtcagagtgatgacccctgacctgagagagcggctggaaaacctgagaaagaagcccgagaacatccctcagcctatcagcaacaccagcagggccaacctgaacaagctgctgaccgactacaccgagatgaagaaagccatcctgcacgtgtactgggaagagttccagaaagaccccgtgggcctgatgagcagagttgctcagcctgccagcaagaagatcgaccagaacaagctgaagcccgagatggacgagaagggcaatctgaccacagccggctttgcctgctctcagtgtggccagcctctgttcgtgtacaagctggaacaggtgtccgagaaaggcaaggcctacaccaactacttcggcagatgtaacgtggccgagcacgagaagctgattctgctggcccagctgaaacctgagaaggactctgatgaggccgtgacctacagcctgggcaagtttggacagagagccctggacttctacagcatccacgtgaccaaagaaagcacacaccccgtgaagcccctggctcagatcgccggcaatagatacgcctcttcccctgtgggcaaagccctgtccgatgcctgcatgggaacaatcgccagcttcctgagcaagtaccaggacatcatcatcgagcaccagaaggtggtcaagggcaaccagaagagactggaaagcctgagggagctggccggcaaagagaacctggaataccccagcgtgaccctgcctcctcagcctcacacaaaagaaggcgtggacgcctacaacgaagtgatcgccagagtgagaatgtgggtcaacctgaacctgtggcagaagctgaaactgtccagggacgacgccaagcctctgctgagactgaagggcttccctagcttccctctggtggaaagacaggccaatgaagtggattggtgggacatggtctgcaacgtgaagaagctgatcaacgagaagaaagaggatggcaaggttttctggcagaacctggccggctacaagagacaagaagccctgaggccttacctgagcagcgaagaggaccggaagaagggcaagaagttcgccagataccagctgggcgacctgctgctgcacctggaaaagaagcacggcgaggactggggcaaagtgtacgatgaggcctgggagagaatcgacaagaaggtggaaggcctgagcaagcacattaagctggaagaggaaagaaggagcgaggacgcccaatctaaagccgctctgaccgattggctgagagccaaggccagctttgtgatcgagggcctgaaagaggccgacaaggacgagttctgcagatgcgagctgaagctgcagaagtggtacggcgatctgagaggcaagcccttcgccattgaggccgagaacagcatcctggacatcagcggcttcagcaagcagtacaactgcgccttcatttggcagaaagacggcgtcaagaaactgaacctgtacctgatcatcaattacttcaaaggcggcaagctgcggttcaagaagatcaaacccgaggccttcgaggctaacagattctacaccgtgatcaacaaaaagtccggcgagatcgtgcccatggaagtgaacttcaacttcgacgaccccaacctgattatcctgcctctggccttcggcaagagacagggcagagagttcatctggaacgatctgctgagcctggaaaccggctctctgaagctggccaatggcagagtgatcgagaaaaccctgtacaacaggagaaccagacaggacgagcctgctctgtttgtggccctgaccttcgagagaagagaggtgctggacagcagcaacatcaagcccatgaacctgatcggcgtggaccggggcgagaatatccctgctgtgatcgccctgacagaccctgaaggatgcccactgagcagattcaaggactccctgggcaaccctacacacatcctgagaatcggcgagagctacaaagagaagcagaggacaatccaggccaagaaagaggtggaacagagaagagccggcggatactctaggaagtacgccagcaaggccaagaatctggccgacgacatggtccgaaacaccgccagagatctgctgtactacgccgtgacacaggacgccatgctgatcttcgagaatctgagcagaggcttcggccggcagggcaagagaacctttatggccgagaggcagtacaccagaatggaagattggctcacagctaaactggcctacgagggactgcccagcaagacctacctgtccaaaacactggcccagtatacctccaagacctgcagcaattgcggcttcaccatcaccagcgccgactacgacagagtgctggaaaagctcaagaaaaccgccaccggctggatgaccaccatcaacggcaaagagctgaaggttgagggccagatcacctactacaacaggtacaagaggcagaacgtcgtgaaggatctgagcgtggaactggacagactgagcgaagagagcgtgaacaacgacatcagcagctggacaaagggcagatcaggcgaggctctgagcctgctgaagaagaggtttagccacagacctgtgcaagagaagttcgtgtgcctgaactgcggcttcgagacacacgccgatgaacaggctgccctgaacattgccagaagctggctgttcctgagaagccaagagtacaagaagtaccagaccaacaagaccaccggcaacaccgacaagagggcctttgtggaaacctggcagagcttctacagaaaaaagctgaaagaagtctggaagcccgccgtg

SEQ ID NO: 763 - skipped

SEQ ID NO: 764 - DNA, 414 bp, synthetic construct; identical to SEQ ID NO: 529
  source 1..414: mol_type = other DNA

SEQ ID NO: 765 - DNA, 314 bp, synthetic construct; identical to SEQ ID NO: 530
  source 1..314: mol_type = other DNA

SEQ ID NO: 766 - DNA, 324 bp, synthetic construct; identical to SEQ ID NO: 531
  source 1..324: mol_type = other DNA

SEQ ID NO: 767 - DNA, 304 bp, synthetic construct; identical to SEQ ID NO: 533
  source 1..304: mol_type = other DNA

SEQ ID NO: 768 - DNA, 364 bp, synthetic construct
  source 1..364: mol_type = other DNA
gccggggtaccgagctggggggcgggagctgtcccggggacaggcctgggtgaggctgccgggacgcagggcccggctggggctacggccgaggccacacctggggctgtctcgggctgtccaccctgggggcggtgggctgccatcccccaatctgtcagtgatgcggttttggcagtacatcaatgggcgtggatagcggtttgactcacggggatttccaagtctccaccccattgacgtcaatgggagtttgttttggcaccaaaatcaacgggactttccaaaatgtcgtaacaactccgccccattgacgcaaatgggcggtaggcgtgtacggtgggaggtctatataagcagagct

SEQ ID NO: 769 - DNA, 274 bp, synthetic construct; identical to SEQ ID NO: 534
  source 1..274: mol_type = other DNA

SEQ ID NO: 770 - DNA, 354 bp, synthetic construct; identical to SEQ ID NO: 535
  source 1..354: mol_type = other DNA

SEQ ID NO: 771 - protein, 11 aa, synthetic construct
MAPKKKRKVSR

SEQ ID NO: 772 - protein, 41 aa, synthetic construct
MAPKKKRKVGGSPKKKRKVGGSPKKKRKVGGSPKKKRKVSR

SEQ ID NO: 773 - protein, 24 aa, synthetic construct
PPPGGGSGGGSGGGSPAAKRVKLD

SEQ ID NO: 774 - protein, 12 aa, synthetic construct
PPPPAAKRVKLD

SEQ ID NO: 775 - DNA, 2370 bp, synthetic construct
  source 1..2370: mol_type = other DNA
gggcagagcgcacatcgcccacagtccccgagaagttggggggaggggtcggcaattgaaccggtgcctagagaaggtggcgcggggtaaactgggaaagtgatgtcgtgtactggctccgcctttttcccgagggtgggggagaaccgtatataagtgcagtagtcgccgtgaacgttctttttcgcaacgggtttgccgccagaacacaggtaagtgccgtgtgtggttcccgcgggcctggcctctttacgggttatggcccttgcgtgccttgaattacttccacctggctgcagtacgtgattcttgatcccgagcttcgggttggaagtgggtgggagagttcgaggccttgcgcttaaggagccccttcgcctcgtgcttgagttgaggcctggcctgggcgctggggccgccgcgtgcgaatctggtggcaccttcgcgcctgtctcgctgctttcgataagtctctagccatttaaaatttttgatgacctgctgcgacgctttttttctggcaagatagtcttgtaaatgcgggccaagatctgcacactggtatttcggtttttggggccgcgggcggcgacggggcccgtgcgtcccagcgcacatgttcggcgaggcggggcctgcgagcgcggccaccgagaatcggacgggggtagtctcaagctggccggcctgctctggtgcctggcctcgcgccgccgtgtatcgccccgccctgggcggcaaggctggcccggtcggcaccagttgcgtgagcggaaagatggccgcttcccggccctgctgcagggagctcaaaatggaggacgcggcgctcgggagagcgggcgggtgagtcacccacacaaaggaaaagggcctttccgtcctcagccgtcgcttcatgtgactccacggagtaccgggcgccgtccaggcacctcgattagttctcgagcttttggagtacgtcgtctttaggttggggggaggggttttatgcgatggagtttccccacactgagtgggtggagactgaagttaggccagcttggcacttgatgtaattctccttggaatttgccctttttgagtttggatcttggttcattctcaagcctcagacagtggttcaaagtttttttcttccatttcaggtgtcgtgaggatccgcggccgcgccaccatggtgagcaagggcgaggagctgttcaccggggtggtgcccatcctggtcgagctggacggcgacgtaaacggccacaagttcagcgtgtccggcgagggcgagggcgatgccacctacggcaagctgaccctgaagttcatctgcaccaccggcaagctgcccgtgccctggcccaccctcgtgaccaccctgacctacggcgtgcagtgcttcagccgctaccccgaccacatgaagcagcacgacttcttcaagtccgccatgcccgaaggctacgtccaggagcgcaccatcttcttcaaggacgacggcaactacaagacccgcgccgaggtgaagttcgagggcgacaccctggtgaaccgcatcgagctgaagggcatcgacttcaaggaggacggcaacatcctggggcacaagctggagtacaactacaacagccacaacgtctatatcatggccgacaagcagaagaacggcatcaaggtgaacttcaagatccgccacaacatcgaggacggcagcgtgcagctcgccgaccactaccagcagaacacccccatcggcgacggccccgtgctgctgcccgacaaccactacctgagcacccagtccgccctgagcaaagaccccaacgagaagcgcgatcacatggtcctgctggagttcgtgaccgccgccgggatcactctcggcatggacgagctgtacaagtagtcgatagttgacccgtaccatgtcctaggcaacagaaggctaaagaaggtatattgctgttgacagtgagcgacgctgatcatcaattacttactgtgaagccacagatgggtaagtaattgatgatcagcgctgcctactgcctcggacttcaaggggctactttaggagcaattatcctaggaaacctgttaggtctaacttacctgatcttcggaagtgtgggctagcctagatcttactgacgtacgtttctggagccaatgatcttaagcttcaaaacgctggctctagtcgcaagatacgactaagcgctgtcgacgggtcctactcgtctctcaacctgctttgtcagttttttttcaattggagactaatgcggccggccattactcctctcgtgtcttgttgcaatgtctgctggtttgtttgatgttgtttgcgggcgggccctatagtgagtcgtatta

SEQ ID NO: 776 - DNA, 2370 bp, synthetic construct
  source 1..2370: mol_type = other DNA
gggcagagcgcacatcgcccacagtccccgagaagttggggggaggggtcggcaattgaaccggtgcctagagaaggtggcgcggggtaaactgggaaagtgatgtcgtgtactggctccgcctttttcccgagggtgggggagaaccgtatataagtgcagtagtcgccgtgaacgttctttttcgcaacgggtttgccgccagaacacaggtaagtgccgtgtgtggttcccgcgggcctggcctctttacgggttatggcccttgcgtgccttgaattacttccacctggctgcagtacgtgattcttgatcccgagcttcgggttggaagtgggtgggagagttcgaggccttgcgcttaaggagccccttcgcctcgtgcttgagttgaggcctggcctgggcgctggggccgccgcgtgcgaatctggtggcaccttcgcgcctgtctcgctgctttcgataagtctctagccatttaaaatttttgatgacctgctgcgacgctttttttctggcaagatagtcttgtaaatgcgggccaagatctgcacactggtatttcggtttttggggccgcgggcggcgacggggcccgtgcgtcccagcgcacatgttcggcgaggcggggcctgcgagcgcggccaccgagaatcggacgggggtagtctcaagctggccggcctgctctggtgcctggcctcgcgccgccgtgtatcgccccgccctgggcggcaaggctggcccggtcggcaccagttgcgtgagcggaaagatggccgcttcccggccctgctgcagggagctcaaaatggaggacgcggcgctcgggagagcgggcgggtgagtcacccacacaaaggaaaagggcctttccgtcctcagccgtcgcttcatgtgactccacggagtaccgggcgccgtccaggcacctcgattagttctcgagcttttggagtacgtcgtctttaggttggggggaggggttttatgcgatggagtttccccacactgagtgggtggagactgaagttaggccagcttggcacttgatgtaattctccttggaatttgccctttttgagtttggatcttggttcattctcaagcctcagacagtggttcaaagtttttttcttccatttcaggtgtcgtgaggatccgcggccgcgccaccatggtgagcaagggcgaggagctgttcaccggggtggtgcccatcctggtcgagctggacggcgacgtaaacggccacaagttcagcgtgtccggcgagggcgagggcgatgccacctacggcaagctgaccctgaagttcatctgcaccaccggcaagctgcccgtgccctggcccaccctcgtgaccaccctgacctacggcgtgcagtgcttcagccgctaccccgaccacatgaagcagcacgacttcttcaagtccgccatgcccgaaggctacgtccaggagcgcaccatcttcttcaaggacgacggcaactacaagacccgcgccgaggtgaagttcgagggcgacaccctggtgaaccgcatcgagctgaagggcatcgacttcaaggaggacggcaacatcctggggcacaagctggagtacaactacaacagccacaacgtctatatcatggccgacaagcagaagaacggcatcaaggtgaacttcaagatccgccacaacatcgaggacggcagcgtgcagctcgccgaccactaccagcagaacacccccatcggcgacggccccgtgctgctgcccgacaaccactacctgagcacccagtccgccctgagcaaagaccccaacgagaagcgcgatcacatggtcctgctggagttcgtgaccgccgccgggatcactctcggcatggacgagctgtacaagtagtcgatagttgacccgtaccatgtcctaggcaacagaaggctaaagaaggtatattgctgttgacagtgagcgacgcaactgcgccttcatttactgtgaagccacagatgggtaaatgaaggcgcagttgcgctgcctactgcctcggacttcaaggggctactttaggagcaattatcctaggaaacctgttaggtctaacttacctgatcttcggaagtgtgggctagcctagatcttactgacgtacgtttctggagccaatgatcttaagcttcaaaacgctggctctagtcgcaagatacgactaagcgctgtcgacgggtcctactcgtctctcaacctgctttgtcagttttttttcaattggagactaatgcggccggccattactcctctcgtgtcttgttgcaatgtctgctggtttgtttgatgttgtttgcgggcgggccctatagtgagtcgtatta

SEQ ID NO: 777 - DNA, 2370 bp, synthetic construct
  source 1..2370: mol_type = other DNA
gggcagagcgcacatcgcccacagtccccgagaagttggggggaggggtcggcaattgaaccggtgcctagagaaggtggcgcggggtaaactgggaaagtgatgtcgtgtactggctccgcctttttcccgagggtgggggagaaccgtatataagtgcagtagtcgccgtgaacgttctttttcgcaacgggtttgccgccagaacacaggtaagtgccgtgtgtggttcccgcgggcctggcctctttacgggttatggcccttgcgtgccttgaattacttccacctggctgcagtacgtgattcttgatcccgagcttcgggttggaagtgggtgggagagttcgaggccttgcgcttaaggagccccttcgcctcgtgcttgagttgaggcctggcctgggcgctggggccgccgcgtgcgaatctggtggcaccttcgcgcctgtctcgctgctttcgataagtctctagccatttaaaatttttgatgacctgctgcgacgctttttttctggcaagatagtcttgtaaatgcgggccaagatctgcacactggtatttcggtttttggggccgcgggcggcgacggggcccgtgcgtcccagcgcacatgttcggcgaggcggggcctgcgagcgcggccaccgagaatcggacgggggtagtctcaagctggccggcctgctctggtgcctggcctcgcgccgccgtgtatcgccccgccctgggcggcaaggctggcccggtcggcaccagttgcgtgagcggaaagatggccgcttcccggccctgctgcagggagctcaaaatggaggacgcggcgctcgggagagcgggcgggtgagtcacccacacaaaggaaaagggcctttccgtcctcagccgtcgcttcatgtgactccacggagtaccgggcgccgtccaggcacctcgattagttctcgagcttttggagtacgtcgtctttaggttggggggaggggttttatgcgatggagtttccccacactgagtgggtggagactgaagttaggccagcttggcacttgatgtaattctccttggaatttgccctttttgagtttggatcttggttcattctcaagcctcagacagtggttcaaagtttttttcttccatttcaggtgtcgtgaggatccgcggccgcgccaccatggtgagcaagggcgaggagctgttcaccggggtggtgcccatcctggtcgagctggacggcgacgtaaacggccacaagttcagcgtgtccggcgagggcgagggcgatgccacctacggcaagctgaccctgaagttcatctgcaccaccggcaagctgcccgtgccctggcccaccctcgtgaccaccctgacctacggcgtgcagtgcttcagccgctaccccgaccacatgaagcagcacgacttcttcaagtccgccatgcccgaaggctacgtccaggagcgcaccatcttcttcaaggacgacggcaactacaagacccgcgccgaggtgaagttcgagggcgacaccctggtgaaccgcatcgagctgaagggcatcgacttcaaggaggacggcaacatcctggggcacaagctggagtacaactacaacagccacaacgtctatatcatggccgacaagcagaagaacggcatcaaggtgaacttcaagatccgccacaacatcgaggacggcagcgtgcagctcgccgaccactaccagcagaacacccccatcggcgacggccccgtgctgctgcccgacaaccactacctgagcacccagtccgccctgagcaaagaccccaacgagaagcgcgatcacatggtcctgctggagttcgtgaccgccgccgggatcactctcggcatggacgagctgtacaagtagtcgatagttgacccgtaccatgtcctaggcaacagaaggctaaagaaggtatattgctgttgacagtgagcgacgctgagcaagcacattaaactgtgaagccacagatgggtttaatgtgcttgctcagcgctgcctactgcctcggacttcaaggggctactttaggagcaattatcctaggaaacctgttaggtctaacttacctgatcttcggaagtgtgggctagcctagatcttactgacgtacgtttctggagccaatgatcttaagcttcaaaacgctggctctagtcgcaagatacgactaagcgctgtcgacgggtcctactcgtctctcaacctgctttgtcagttttttttcaattggagactaatgcggccggccattactcctctcgtgtcttgttgcaatgtctgctggtttgtttgatgttgtttgcgggcgggccctatagtgagtcgtatta

SEQ ID NO: 778 - DNA, 2370 bp, synthetic construct
  source 1..2370: mol_type = other DNA
gggcagagcgcacatcgcccacagtccccgagaagttggggggaggggtcggcaattgaaccggtgcctagagaaggtggcgcggggtaaactgggaaagtgatgtcgtgtactggctccgcctttttcccgagggtgggggagaaccgtatataagtgcagtagtcgccgtgaacgttctttttcgcaacgggtttgccgccagaacacaggtaagtgccgtgtgtggttcccgcgggcctggcctctttacgggttatggcccttgcgtgccttgaattacttccacctggctgcagtacgtgattcttgatcccgagcttcgggttggaagtgggtgggagagttcgaggccttgcgcttaaggagccccttcgcctcgtgcttgagttgaggcctggcctgggcgctggggccgccgcgtgcgaatctggtggcaccttcgcgcctgtctcgctgctttcgataagtctctagccatttaaaatttttgatgacctgctgcgacgctttttttctggcaagatagtcttgtaaatgcgggccaagatctgcacactggtatttcggtttttggggccgcgggcggcgacggggcccgtgcgtcccagcgcacatgttcggcgaggcggggcctgcgagcgcggccaccgagaatcggacgggggtagtctcaagctggccggcctgctctggtgcctggcctcgcgccgccgtgtatcgccccgccctgggcggcaaggctggcccggtcggcaccagttgcgtgagcggaaagatggccgcttcccggccctgctgcagggagctcaaaatggaggacgcggcgctcgggagagcgggcgggtgagtcacccacacaaaggaaaagggcctttccgtcctcagccgtcgcttcatgtgactccacggagtaccgggcgccgtccaggcacctcgattagttctcgagcttttggagtacgtcgtctttaggttggggggaggggttttatgcgatggagtttccccacactgagtgggtggagactgaagttaggccagcttggcacttgatgtaattctccttggaatttgccctttttgagtttggatcttggttcattctcaagcctcagacagtggttcaaagtttttttcttccatttcaggtgtcgtgaggatccgcggccgcgccaccatggtgagcaagggcgaggagctgttcaccggggtggtgcccatcctggtcgagctggacggcgacgtaaacggccacaagttcagcgtgtccggcgagggcgagggcgatgccacctacggcaagctgaccctgaagttcatctgcaccaccggcaagctgcccgtgccctggcccaccctcgtgaccaccctgacctacggcgtgcagtgcttcagccgctaccccgaccacatgaagcagcacgacttcttcaagtccgccatgcccgaaggctacgtccaggagcgcaccatcttcttcaaggacgacggcaactacaagacccgcgccgaggtgaagttcgagggcgacaccctggtgaaccgcatcgagctgaagggcatcgacttcaaggaggacggcaacatcctggggcacaagctggagtacaactacaacagccacaacgtctatatcatggccgacaagcagaagaacggcatcaaggtgaacttcaagatccgccacaacatcgaggacggcagcgtgcagctcgccgaccactaccagcagaacacccccatcggcgacggccccgtgctgctgcccgacaaccactacctgagcacccagtccgccctgagcaaagaccccaacgagaagcgcgatcacatggtcctgctggagttcgtgaccgccgccgggatcactctcggcatggacgagctgtacaagtagtcgatagttgacccgtaccatgtcctaggcaacagaaggctaaagaaggtatattgctgttgacagtgagcgacgcctgatcatcaattactactgtgaagccacagatgggtagtaattgatgatcaggcgctgcctactgcctcggacttcaaggggctactttaggagcaattatcctaggaaacctgttaggtctaacttacctgatcttcggaagtgtgggctagcctagatcttactgacgtacgtttctggagccaatgatcttaagcttcaaaacgctggctctagtcgcaagatacgactaagcgctgtcgacgggtcctactcgtctctcaacctgctttgtcagttttttttcaattggagactaatgcggccggccattactcctctcgtgtcttgttgcaatgtctgctggtttgtttgatgttgtttgcgggcgggccctatagtgagtcgtatta

SEQ ID NO: 779 - DNA, 2370 bp, synthetic construct
  source 1..2370: mol_type = other DNA
gggcagagcgcacatcgcccacagtccccgagaagttggggggaggggtcggcaattgaaccggtgcctagagaaggtggcgcggggtaaactgggaaagtgatgtcgtgtactggctccgcctttttcccgagggtgggggagaaccgtatataagtgcagtagtcgccgtgaacgttctttttcgcaacgggtttgccgccagaacacaggtaagtgccgtgtgtggttcccgcgggcctggcctctttacgggttatggcccttgcgtgccttgaattacttccacctggctgcagtacgtgattcttgatcccgagcttcgggttggaagtgggtgggagagttcgaggccttgcgcttaaggagccccttcgcctcgtgcttgagttgaggcctggcctgggcgctggggccgccgcgtgcgaatctggtggcaccttcgcgcctgtctcgctgctttcgataagtctctagccatttaaaatttttgatgacctgctgcgacgctttttttctggcaagatagtcttgtaaatgcgggccaagatctgcacactggtatttcggtttttggggccgcgggcggcgacggggcccgtgcgtcccagcgcacatgttcggcgaggcggggcctgcgagcgcggccaccgagaatcggacgggggtagtctcaagctggccggcctgctctggtgcctggcctcgcgccgccgtgtatcgccccgccctgggcggcaaggctggcccggtcggcaccagttgcgtgagcggaaagatggccgcttcccggccctgctgcagggagctcaaaatggaggacgcggcgctcgggagagcgggcgggtgagtcacccacacaaaggaaaagggcctttccgtcctcagccgtcgcttcatgtgactccacggagtaccgggcgccgtccaggcacctcgattagttctcgagcttttggagtacgtcgtctttaggttggggggaggggttttatgcgatggagtttccccacactgagtgggtggagactgaagttaggccagcttggcacttgatgtaattctccttggaatttgccctttttgagtttggatcttggttcattctcaagcctcagacagtggttcaaagtttttttcttccatttcaggtgtcgtgaggatccgcggccgcgccaccatggtgagcaagggcgaggagctgttcaccggggtggtgcccatcctggtcgagctggacggcgacgtaaacggccacaagttcagcgtgtccggcgagggcgagggcgatgccacctacggcaagctgaccctgaagttcatctgcaccaccggcaagctgcccgtgccctggcccaccctcgtgaccaccctgacctacggcgtgcagtgcttcagccgctaccccgaccacatgaagcagcacgacttcttcaagtccgccatgcccgaaggctacgtccaggagcgcaccatcttcttcaaggacgacggcaactacaagacccgcgccgaggtgaagttcgagggcgacaccctggtgaaccgcatcgagctgaagggcatcgacttcaaggaggacggcaacatcctggggcacaagctggagtacaactacaacagccacaacgtctatatcatggccgacaagcagaagaacggcatcaaggtgaacttcaagatccgccacaacatcgaggacggcagcgtgcagctcgccgaccactaccagcagaacacccccatcggcgacggccccgtgctgctgcccgacaaccactacctgagcacccagtccgccctgagcaaagaccccaacgagaagcgcgatcacatggtcctgctggagttcgtgaccgccgccgggatcactctcggcatggacgagctgtacaagtagtcgatagttgacccgtaccatgtcctaggcaacagaaggctaaagaaggtatattgctgttgacagtgagcgacggtacctgatcatcaattactgtgaagccacagatgggtaattgatgatcaggtaccgctgcctactgcctcggacttcaaggggctactttaggagcaattatcctaggaaacctgttaggtctaacttacctgatcttcggaagtgtgggctagcctagatcttactgacgtacgtttctggagccaatgatcttaagcttcaaaacgctggctctagtcgcaagatacgactaagcgctgtcgacgggtcctactcgtctctcaacctgctttgtcagttttttttcaattggagactaatgcggccggccattactcctctcgtgtcttgttgcaatgtctgctggtttgtttgatgttgtttgcgggcgggccctatagtgagtcgtatta

SEQ ID NO: 780 - DNA, 2370 bp, synthetic construct
  source 1..2370: mol_type = other DNA
gggcagagcgcacatcgcccacagtccccgagaagttggggggaggggtcggcaattgaaccggtgcctagagaaggtggcgcggggtaaactgggaaagtgatgtcgtgtactggctccgcctttttcccgagggtgggggagaaccgtatataagtgcagtagtcgccgtgaacgttctttttcgcaacgggtttgccgccagaacacaggtaagtgccgtgtgtggttcccgcgggcctggcctctttacgggttatggcccttgcgtgccttgaattacttccacctggctgcagtacgtgattcttgatcccgagcttcgggttggaagtgggtgggagagttcgaggccttgcgcttaaggagccccttcgcctcgtgcttgagttgaggcctggcctgggcgctggggccgccgcgtgcgaatctggtggcaccttcgcgcctgtctcgctgctttcgataagtctctagccatttaaaatttttgatgacctgctgcgacgctttttttctggcaagatagtcttgtaaatgcgggccaagatctgcacactggtatttcggtttttggggccgcgggcggcgacggggcccgtgcgtcccagcgcacatgttcggcgaggcggggcctgcgagcgcggccaccgagaatcggacgggggtagtctcaagctggccggcctgctctggtgcctggcctcgcgccgccgtgtatcgccccgccctgggcggcaaggctggcccggtcggcaccagttgcgtgagcggaaagatggccgcttcccggccctgctgcagggagctcaaaatggaggacgcggcgctcgggagagcgggcgggtgagtcacccacacaaaggaaaagggcctttccgtcctcagccgtcgcttcatgtgactccacggagtaccgggcgccgtccaggcacctcgattagttctcgagcttttggagtacgtcgtctttaggttggggggaggggttttatgcgatggagtttccccacactgagtgggtggagactgaagttaggccagcttggcacttgatgtaattctccttggaatttgccctttttgagtttggatcttggttcattctcaagcctcagacagtggttcaaagtttttttcttccatttcaggtgtcgtgaggatccgcggccgcgccaccatggtgagcaagggcgaggagctgttcaccggggtggtgcccatcctggtcgagctggacggcgacgtaaacggccacaagttcagcgtgtccggcgagggcgagggcgatgccacctacggcaagctgaccctgaagttcatctgcaccaccggcaagctgcccgtgccctggcccaccctcgtgaccaccctgacctacggcgtgcagtgcttcagccgctaccccgaccacatgaagcagcacgacttcttcaagtccgccatgcccgaaggctacgtccaggagcgcaccatcttcttcaaggacgacggcaactacaagacccgcgccgaggtgaagttcgagggcgacaccctggtgaaccgcatcgagctgaagggcatcgacttcaaggaggacggcaacatcctggggcacaagctggagtacaactacaacagccacaacgtctatatcatggccgacaagcagaagaacggcatcaaggtgaacttcaagatccgccacaacatcgaggacggcagcgtgcagctcgccgaccactaccagcagaacacccccatcggcgacggccccgtgctgctgcccgacaaccactacctgagcacccagtccgccctgagcaaagaccccaacgagaagcgcgatcacatggtcctgctggagttcgtgaccgccgccgggatcactctcggcatggacgagctgtacaagtagtcgatagttgacccgtaccatgtcctaggcaacagaaggctaaagaaggtatattgctgttgacagtgagcgacgttcatttggcagaaagaactgtgaagccacagatgggttctttctgccaaatgaacgctgcctactgcctcggacttcaaggggctactttaggagcaattatcctaggaaacctgttaggtctaacttacctgatcttcggaagtgtgggctagcctagatcttactgacgtacgtttctggagccaatgatcttaagcttcaaaacgctggctctagtcgcaagatacgactaagcgctgtcgacgggtcctactcgtctctcaacctgctttgtcagttttttttcaattggagactaatgcggccggccattactcctctcgtgtcttgttgcaatgtctgctggtttgtttgatgttgtttgcgggcgggccctatagtgagtcgtatta

SEQ ID NO: 781 - DNA, 2370 bp, synthetic construct
  source 1..2370: mol_type = other DNA
gggcagagcgcacatcgcccacagtccccgagaagttggggggaggggtcggcaattgaaccggtgcctagagaaggtggcgcggggtaaactgggaaagtgatgtcgtgtactggctccgcctttttcccgagggtgggggagaaccgtatataagtgcagtagtcgccgtgaacgttctttttcgcaacgggtttgccgccagaacacaggtaagtgccgtgtgtggttcccgcgggcctggcctctttacgggttatggcccttgcgtgccttgaattacttccacctggctgcagtacgtgattcttgatcccgagcttcgggttggaagtgggtgggagagttcgaggccttgcgcttaaggagccccttcgcctcgtgcttgagttgaggcctggcctgggcgctggggccgccgcgtgcgaatctggtggcaccttcgcgcctgtctcgctgctttcgataagtctctagccatttaaaatttttgatgacctgctgcgacgctttttttctggcaagatagtcttgtaaatgcgggccaagatctgcacactggtatttcggtttttggggccgcgggcggcgacggggcccgtgcgtcccagcgcacatgttcggcgaggcggggcctgcgagcgcggccaccgagaatcggacgggggtagtctcaagctggccggcctgctctggtgcctggcctcgcgccgccgtgtatcgccccgccctgggcggcaaggctggcccggtcggcaccagttgcgtgagcggaaagatggccgcttcccggccctgctgcagggagctcaaaatggaggacgcggcgctcgggagagcgggcgggtgagtcacccacacaaaggaaaagggcctttccgtcctcagccgtcgcttcatgtgactccacggagtaccgggcgccgtccaggcacctcgattagttctcgagcttttggagtacgtcgtctttaggttggggggaggggttttatgcgatggagtttccccacactgagtgggtggagactgaagttaggccagcttggcacttgatgtaattctccttggaatttgccctttttgagtttggatcttggttcattctcaagcctcagacagtggttcaaagtttttttcttccatttcaggtgtcgtgaggatccgcggccgcgccaccatggtgagcaagggcgaggagctgttcaccggggtggtgcccatcctggtcgagctggacggcgacgtaaacggccacaagttcagcgtgtccggcgagggcgagggcgatgccacctacggcaagctgaccctgaagttcatctgcaccaccggcaagctgcccgtgccctggcccaccctcgtgaccaccctgacctacggcgtgcagtgcttcagccgctaccccgaccacatgaagcagcacgacttcttcaagtccgccatgcccgaaggctacgtccaggagcgcaccatcttcttcaaggacgacggcaactacaagacccgcgccgaggtgaagttcgagggcgacaccctggtgaaccgcatcgagctgaagggcatcgacttcaaggaggacggcaacatcctggggcacaagctggagtacaactacaacagccacaacgtctatatcatggccgacaagcagaagaacggcatcaaggtgaacttcaagatccgccacaacatcgaggacggcagcgtgcagctcgccgaccactaccagcagaacacccccatcggcgacggccccgtgctgctgcccgacaaccactacctgagcacccagtccgccctgagcaaagaccccaacgagaagcgcgatcacatggtcctgctggagttcgtgaccgccgccgggatcactctcggcatggacgagctgtacaagtagtcgatagttgacccgtaccatgtcctaggcaacagaaggctaaagaaggtatattgctgttgacagtgagcgacgcatcaattacttcaaagactgtgaagccacagatgggtctttgaagtaattgatgcgctgcctactgcctcggacttcaaggggctactttaggagcaattatcctaggaaacctgttaggtctaacttacctgatcttcggaagtgtgggctagcctagatcttactgacgtacgtttctggagccaatgatcttaagcttcaaaacgctggctctagtcgcaagatacgactaagcgctgtcgacgggtcctactcgtctctcaacctgctttgtcagttttttttcaattggagactaatgcggccggccattactcctctcgtgtcttgttgcaatgtctgctggtttgtttgatgttgtttgcgggcgggccctatagtgagtcgtatta

SEQ ID NO: 782 - DNA, 2370 bp, synthetic construct
  source 1..2370: mol_type = other DNA
gggcagagcgcacatcgcccacagtccccgagaagttggggggaggggtcggcaattgaaccggtgcctagagaaggtggcgcggggtaaactgggaaagtgatgtcgtgtactggctccgcctttttcccgagggtgggggagaaccgtatataagtgcagtagtcgccgtgaacgttctttttcgcaacgggtttgccgccagaacacaggtaagtgccgtgtgtggttcccgcgggcctggcctctttacgggttatggcccttgcgtgccttgaattacttccacctggctgcagtacgtgattcttgatcccgagcttcgggttggaagtgggtgggagagttcgaggccttgcgcttaaggagccccttcgcctcgtgcttgagttgaggcctggcctgggcgctggggccgccgcgtgcgaatctggtggcaccttcgcgcctgtctcgctgctttcgataagtctctagccatttaaaatttttgatgacctgctgcgacgctttttttctggcaagatagtcttgtaaatgcgggccaagatctgcacactggtatttcggtttttggggccgcgggcggcgacggggcccgtgcgtcccagcgcacatgttcggcgaggcggggcctgcgagcgcggccaccgagaatcggacgggggtagtctcaagctggccggcctgctctggtgcctggcctcgcgccgccgtgtatcgccccgccctgggcggcaaggctggcccggtcggcaccagttgcgtgagcggaaagatggccgcttcccggccctgctgcagggagctcaaaatggaggacgcggcgctcgggagagcgggcgggtgagtcacccacacaaaggaaaagggcctttccgtcctcagccgtcgcttcatgtgactccacggagtaccgggcgccgtccaggcacctcgattagttctcgagcttttggagtacgtcgtctttaggttggggggaggggttttatgcgatggagtttccccacactgagtgggtggagactgaagttaggccagcttggcacttgatgtaattctccttggaatttgccctttttgagtttggatcttggttcattctcaagcctcagacagtggttcaaagtttttttcttccatttcaggtgtcgtgaggatccgcggccgcgccaccatggtgagcaagggcgaggagctgttcaccggggtggtgcccatcctggtcgagctggacggcgacgtaaacggccacaagttcagcgtgtccggcgagggcgagggcgatgccacctacggcaagctgaccctgaagttcatctgcaccaccggcaagctgcccgtgccctggcccaccctcgtgaccaccctgacctacggcgtgcagtgcttcagccgctaccccgaccacatgaagcagcacgacttcttcaagtccgccatgcccgaaggctacgtccaggagcgcaccatcttcttcaaggacgacggcaactacaagacccgcgccgaggtgaagttcgagggcgacaccctggtgaaccgcatcgagctgaagggcatcgacttcaaggaggacggcaacatcctggggcacaagctggagtacaactacaacagccacaacgtctatatcatggccgacaagcagaagaacggcatcaaggtgaacttcaagatccgccacaacatcgaggacggcagcgtgcagctcgccgaccactaccagcagaacacccccatcggcgacggccccgtgctgctgcccgacaaccactacctgagcacccagtccgccctgagcaaagaccccaacgagaagcgcgatcacatggtcctgctggagttcgtgaccgccgccgggatcactctcggcatggacgagctgtacaagtagtcgatagttgacccgtaccatgtcctaggcaacagaaggctaaagaaggtatattgctgttgacagtgagcgacgtacctgatcatcaattaactgtgaagccacagatgggttaattgatgatcaggtacgctgcctactgcctcggacttcaaggggctactttaggagcaattatcctaggaaacctgttaggtctaacttacctgatcttcggaagtgtgggctagcctagatcttactgacgtacgtttctggagccaatgatcttaagcttcaaaacgctggctctagtcgcaagatacgactaagcgctgtcgacgggtcctactcgtctctcaacctgctttgtcagttttttttcaattggagactaatgcggccggccattactcctctcgtgtcttgttgcaatgtctgctggtttgtttgatgttgtttgcgggcgggccctatagtgagtcgtatta

SEQ ID NO: 783 - DNA, 2370 bp, synthetic construct
  source 1..2370: mol_type = other DNA
gggcagagcgcacatcgcccacagtccccgagaagttggggggaggggtcggcaattgaaccggtgcctagagaaggtggcgcggggtaaactgggaaagtgatgtcgtgtactggctccgcctttttcccgagggtgggggagaaccgtatataagtgcagtagtcgccgtgaacgttctttttcgcaacgggtttgccgccagaacacaggtaagtgccgtgtgtggttcccgcgggcctggcctctttacgggttatggcccttgcgtgccttgaattacttccacctggctgcagtacgtgattcttgatcccgagcttcgggttggaagtgggtgggagagttcgaggccttgcgcttaaggagccccttcgcctcgtgcttgagttgaggcctggcctgggcgctggggccgccgcgtgcgaatctggtggcaccttcgcgcctgtctcgctgctttcgataagtctctagccatttaaaatttttgatgacctgctgcgacgctttttttctggcaagatagtcttgtaaatgcgggccaagatctgcacactggtatttcggtttttggggccgcgggcggcgacggggcccgtgcgtcccagcgcacatgttcggcgaggcggggcctgcgagcgcggccaccgagaatcggacgggggtagtctcaagctggccggcctgctctggtgcctggcctcgcgccgccgtgtatcgccccgccctgggcggcaaggctggcccggtcggcaccagttgcgtgagcggaaagatggccgcttcccggccctgctgcagggagctcaaaatggaggacgcggcgctcgggagagcgggcgggtgagtcacccacacaaaggaaaagggcctttccgtcctcagccgtcgcttcatgtgactccacggagtaccgggcgccgtccaggcacctcgattagttctcgagcttttggagtacgtcgtctttaggttggggggaggggttttatgcgatggagtttccccacactgagtgggtggagactgaagttaggccagcttggcacttgatgtaattctccttggaatttgccctttttgagtttggatcttggttcattctcaagcctcagacagtggttcaaagtttttttcttccatttcaggtgtcgtgaggatccgcggccgcgccaccatggtgagcaagggcgaggagctgttcaccggggtggtgcccatcctggtcgagctggacggcgacgtaaacggccacaagttcagcgtgtccggcgagggcgagggcgatgccacctacggcaagctgaccctgaagttcatctgcaccaccggcaagctgcccgtgccctggcccaccctcgtgaccaccctgacctacggcgtgcagtgcttcagccgctaccccgaccacatgaagcagcacgacttcttcaagtccgccatgcccgaaggctacgtccaggagcgcaccatcttcttcaaggacgacggcaactacaagacccgcgccgaggtgaagttcgagggcgacaccctggtgaaccgcatcgagctgaagggcatcgacttcaaggaggacggcaacatcctggggcacaagctggagtacaactacaacagccacaacgtctatatcatggccgacaagcagaagaacggcatcaaggtgaacttcaagatccgccacaacatcgaggacggcagcgtgcagctcgccgaccactaccagcagaacacccccatcggcgacggccccgtgctgctgcccgacaaccactacctgagcacccagtccgccctgagcaaagaccccaacgagaagcgcgatcacatggtcctgctggagttcgtgaccgccgccgggatcactctcggcatggacgagctgtacaagtagtcgatagttgacccgtaccatgtcctaggcaacagaaggctaaagaaggtatattgctgttgacagtgagcgacgctgatcttcgagaatctactgtgaagccacagatgggtagattctcgaagatcagcgctgcctactgcctcggacttcaaggggctactttaggagcaattatcctaggaaacctgttaggtctaacttacctgatcttcggaagtgtgggctagcctagatcttactgacgtacgtttctggagccaatgatcttaagcttcaaaacgctggctctagtcgcaagatacgactaagcgctgtcgacgggtcctactcgtctctcaacctgctttgtcagttttttttcaattggagactaatgcggccggccattactcctctcgtgtcttgttgcaatgtctgctggtttgtttgatgttgtttgcgggcgggccctatagtgagtcgtatta

SEQ ID NO: 784 - DNA, 2370 bp, synthetic construct
  source 1..2370: mol_type = other DNA
gggcagagcgcacatcgcccacagtccccgagaagttggggggaggggtcggcaattgaaccggtgcctagagaaggtggcgcggggtaaactgggaaagtgatgtcgtgtactggctccgcctttttcccgagggtgggggagaaccgtatataagtgcagtagtcgccgtgaacgttctttttcgcaacgggtttgccgccagaacacaggtaagtgccgtgtgtggttcccgcgggcctggcctctttacgggttatggcccttgcgtgccttgaattacttccacctggctgcagtacgtgattcttgatcccgagcttcgggttggaagtgggtgggagagttcgaggccttgcgcttaaggagccccttcgcctcgtgcttgagttgaggcctggcctgggcgctggggccgccgcgtgcgaatctggtggcaccttcgcgcctgtctcgctgctttcgataagtctctagccatttaaaatttttgatgacctgctgcgacgctttttttctggcaagatagtcttgtaaatgcgggccaagatctgcacactggtatttcggtttttggggccgcgggcggcgacggggcccgtgcgtcccagcgcacatgttcggcgaggcggggcctgcgagcgcggccaccgagaatcggacgggggtagtctcaagctggccggcctgctctggtgcctggcctcgcgccgccgtgtatcgccccgccctgggcggcaaggctggcccggtcggcaccagttgcgtgagcggaaagatggccgcttcccggccctgctgcagggagctcaaaatggaggacgcggcgctcgggagagcgggcgggtgagtcacccacacaaaggaaaagggcctttccgtcctcagccgtcgcttcatgtgactccacggagtaccgggcgccgtccaggcacctcgattagttctcgagcttttggagtacgtcgtctttaggttggggggaggggttttatgcgatggagtttccccacactgagtgggtggagactgaagttaggccagcttggcacttgatgtaattctccttggaatttgccctttttgagtttggatcttggttcattctcaagcctcagacagtggttcaaagtttttttcttccatttcaggtgtcgtgaggatccgcggccgcgccaccatggtgagcaagggcgaggagctgttcaccggggtggtgcccatcctggtcgagctggacggcgacgtaaacggccacaagttcagcgtgtccggcgagggcgagggcgatgccacctacggcaagctgaccctgaagttcatctgcaccaccggcaagctgcccgtgccctggcccaccctcgtgaccaccctgacctacggcgtgcagtgcttcagccgctaccccgaccacatgaagcagcacgacttcttcaagtccgccatgcccgaaggctacgtccaggagcgcaccatcttcttcaaggacgacggcaactacaagacccgcgccgaggtgaagttcgagggcgacaccctggtgaaccgcatcgagctgaagggcatcgacttcaaggaggacggcaacatcctggggcacaagctggagtacaactacaacagccacaacgtctatatcatggccgacaagcagaagaacggcatcaaggtgaacttcaagatccgccacaacatcgaggacggcagcgtgcagctcgccgaccactaccagcagaacacccccatcggcgacggccccgtgctgctgcccgacaaccactacctgagcacccagtccgccctgagcaaagaccccaacgagaagcgcgatcacatggtcctgctggagttcgtgaccgccgccgggatcactctcggcatggacgagctgtacaagtagtcgatagttgacccgtaccatgtcctaggcaacagaaggctaaagaaggtatattgctgttgacagtgagcgacggaagaagggcaagaagtactgtgaagccacagatgggtacttcttgcccttcttccgctgcctactgcctcggacttcaaggggctactttaggagcaattatcctaggaaacctgttaggtctaacttacctgatcttcggaagtgtgggctagcctagatcttactgacgtacgtttctggagccaatgatcttaagcttcaaaacgctggctctagtcgcaagatacgactaagcgctgtcgacgggtcctactcgtctctcaacctgctttgtcagttttttttcaattggagactaatgcggccggccattactcctctcgtgtcttgttgcaatgtctgctggtttgtttgatgttgtttgcgggcgggccctatagtgagtcgtatta

SEQ ID NO: 785 - DNA, 2370 bp, synthetic construct
  source 1..2370: mol_type = other DNA
gggcagagcgcacatcgcccacagtccccgagaagttggggggaggggtcggcaattgaaccggtgcctagagaaggtggcgcggggtaaactgggaaagtgatgtcgtgtactggctccgcctttttcccgagggtgggggagaaccgtatataagtgcagtagtcgccgtgaacgttctttttcgcaacgggtttgccgccagaacacaggtaagtgccgtgtgtggttcccgcgggcctggcctctttacgggttatggcccttgcgtgccttgaattacttccacctggctgcagtacgtgattcttgatcccgagcttcgggttggaagtgggtgggagagttcgaggccttgcgcttaaggagccccttcgcctcgtgcttgagttgaggcctggcctgggcgctggggccgccgcgtgcgaatctggtggcaccttcgcgcctgtctcgctgctttcgataagtctctagccatttaaaatttttgatgacctgctgcgacgctttttttctggcaagatagtcttgtaaatgcgggccaagatctgcacactggtatttcggtttttggggccgcgggcggcgacggggcccgtgcgtcccagcgcacatgttcggcgaggcggggcctgcgagcgcggccaccgagaatcggacgggggtagtctcaagctggccggcctgctctggtgcctggcctcgcgccgccgtgtatcgccccgccctgggcggcaaggctggcccggtcggcaccagttgcgtgagcggaaagatggccgcttcccggccctgctgcagggagctcaaaatggaggacgcggcgctcgggagagcgggcgggtgagtcacccacacaaaggaaaagggcctttccgtcctcagccgtcgcttcatgtgactccacggagtaccgggcgccgtccaggcacctcgattagttctcgagcttttggagtacgtcgtctttaggttggggggaggggttttatgcgatggagtttccccacactgagtgggtggagactgaagttaggccagcttggcacttgatgtaattctccttggaatttgccctttttgagtttggatcttggttcattctcaagcctcagacagtggttcaaagtttttttcttccatttcaggtgtcgtgaggatccgcggccgcgccaccatggtgagcaagggcgaggagctgttcaccggggtggtgcccatcctggtcgagctggacggcgacgtaaacggccacaagttcagcgtgtccggcgagggcgagggcgatgccacctacggcaagctgaccctgaagttcatctgcaccaccggcaagctgcccgtgccctggcccaccctcgtgaccaccctgacctacggcgtgcagtgcttcagccgctaccccgaccacatgaagcagcacgacttcttcaagtccgccatgcccgaaggctacgtccaggagcgcaccatcttcttcaaggacgacggcaactacaagacccgcgccgaggtgaagttcgagggcgacaccctggtgaaccgcatcgagctgaagggcatcgacttcaaggaggacggcaacatcctggggcacaagctggagtacaactacaacagccacaacgtctatatcatggccgacaagcagaagaacggcatcaaggtgaacttcaagatccgccacaacatcgaggacggcagcgtgcagctcgccgaccactaccagcagaacacccccatcggcgacggccccgtgctgctgcccgacaaccactacctgagcacccagtccgccctgagcaaagaccccaacgagaagcgcgatcacatggtcctgctggagttcgtgaccgccgccgggatcactctcggcatggacgagctgtacaagtagtcgatagttgacccgtaccatgtcctaggcaacagaaggctaaagaaggtatattgctgttgacagtgagcgacggatcaacgagaagaaagactgtgaagccacagatgggtctttcttctcgttgatccgctgcctactgcctcggacttcaaggggctactttaggagcaattatcctaggaaacctgttaggtctaacttacctgatcttcggaagtgtgggctagcctagatcttactgacgtacgtttctggagccaatgatcttaagcttcaaaacgctggctctagtcgcaagatacgactaagcgctgtcgacgggtcctactcgtctctcaacctgctttgtcagttttttttcaattggagactaatgcggccggccattactcctctcgtgtcttgttgcaatgtctgctggtttgtttgatgttgtttgcgggcgggccctatagtgagtcgtatta

SEQ ID NO: 786 - DNA, 2370 bp, synthetic construct
  source 1..2370: mol_type = other DNA
gggcagagcgcacatcgcccacagtccccgagaagttggggggaggggtcggcaattgaaccggtgcctagagaaggtggcgcggggtaaactgggaaagtgatgtcgtgtactggctccgcctttttcccgagggtgggggagaaccgtatataagtgcagtagtcgccgtgaacgttctttttcgcaacgggtttgccgccagaacacaggtaagtgccgtgtgtggttcccgcgggcctggcctctttacgggttatggcccttgcgtgccttgaattacttccacctggctgcagtacgtgattcttgatcccgagcttcgggttggaagtgggtgggagagttcgaggccttgcgcttaaggagccccttcgcctcgtgcttgagttgaggcctggcctgggcgctggggccgccgcgtgcgaatctggtggcaccttcgcgcctgtctcgctgctttcgataagtctctagccatttaaaatttttgatgacctgctgcgacgctttttttctggcaagatagtcttgtaaatgcgggccaagatctgcacactggtatttcggtttttggggccgcgggcggcgacggggcccgtgcgtcccagcgcacatgttcggcgaggcggggcctgcgagcgcggccaccgagaatcggacgggggtagtctcaagctggccggcctgctctggtgcctggcctcgcgccgccgtgtatcgccccgccctgggcggcaaggctggcccggtcggcaccagttgcgtgagcggaaagatggccgcttcccggccctgctgcagggagctcaaaatggaggacgcggcgctcgggagagcgggcgggtgagtcacccacacaaaggaaaagggcctttccgtcctcagccgtcgcttcatgtgactccacggagtaccgggcgccgtccaggcacctcgattagttctcgagcttttggagtacgtcgtctttaggttggggggaggggttttatgcgatggagtttccccacactgagtgggtggagactgaagttaggccagcttggcacttgatgtaattctccttggaatttgccctttttgagtttggatcttggttcattctcaagcctcagacagtggttcaaagtttttttcttccatttcaggtgtcgtgaggatccgcggccgcgccaccatggtgagcaagggcgaggagctgttcaccggggtggtgcccatcctggtcgagctggacggcgacgtaaacggccacaagttcagcgtgtccggcgagggcgagggcgatgccacctacggcaagctgaccctgaagttcatctgcaccaccggcaagctgcccgtgccctggcccaccctcgtgaccaccctgacctacggcgtgcagtgcttcagccgctaccccgaccacatgaagcagcacgacttcttcaagtccgccatgcccgaaggctacgtccaggagcgcaccatcttcttcaaggacgacggcaactacaagacccgcgccgaggtgaagttcgagggcgacaccctggtgaaccgcatcgagctgaagggcatcgacttcaaggaggacggcaacatcctggggcacaagctggagtacaactacaacagccacaacgtctatatcatggccgacaagcagaagaacggcatcaaggtgaacttcaagatccgccacaacatcgaggacggcagcgtgcagctcgccgaccactaccagcagaacacccccatcggcgacggccccgtgctgctgcccgacaaccactacctgagcacccagtccgccctgagcaaagaccccaacgagaagcgcgatcacatggtcctgctggagttcgtgaccgccgccgggatcactctcggcatggacgagctgtacaagtagtcgatagttgacccgtaccatgtcctaggcaacagaaggctaaagaaggtatattgctgttgacagtgagcgacggaagagttccagaaagaactgtgaagccacagatgggttctttctggaactcttccgctgcctactgcctcggacttcaaggggctactttaggagcaattatcctaggaaacctgttaggtctaacttacctgatcttcggaagtgtgggctagcctagatcttactgacgtacgtttctggagccaatgatcttaagcttcaaaacgctggctctagtcgcaagatacgactaagcgctgtcgacgggtcctactcgtctctcaacctgctttgtcagttttttttcaattggagactaatgcggccggccattactcctctcgtgtcttgttgcaatgtctgctggtttgtttgatgttgtttgcgggcgggccctatagtgagtcgtatta

SEQ ID NO: 787 - DNA, 2215 bp, synthetic construct
  source 1..2215: mol_type = other DNA
gggcagagcgcacatcgcccacagtccccgagaagttggggggaggggtcggcaattgaaccggtgcctagagaaggtggcgcggggtaaactgggaaagtgatgtcgtgtactggctccgcctttttcccgagggtgggggagaaccgtatataagtgcagtagtcgccgtgaacgttctttttcgcaacgggtttgccgccagaacacaggtaagtgccgtgtgtggttcccgcgggcctggcctctttacgggttatggcccttgcgtgccttgaattacttccacctggctgcagtacgtgattcttgatcccgagcttcgggttggaagtgggtgggagagttcgaggccttgcgcttaaggagccccttcgcctcgtgcttgagttgaggcctggcctgggcgctggggccgccgcgtgcgaatctggtggcaccttcgcgcctgtctcgctgctttcgataagtctctagccatttaaaatttttgatgacctgctgcgacgctttttttctggcaagatagtcttgtaaatgcgggccaagatctgcacactggtatttcggtttttggggccgcgggcggcgacggggcccgtgcgtcccagcgcacatgttcggcgaggcggggcctgcgagcgcggccaccgagaatcggacgggggtagtctcaagctggccggcctgctctggtgcctggcctcgcgccgccgtgtatcgccccgccctgggcggcaaggctggcccggtcggcaccagttgcgtgagcggaaagatggccgcttcccggccctgctgcagggagctcaaaatggaggacgcggcgctcgggagagcgggcgggtgagtcacccacacaaaggaaaagggcctttccgtcctcagccgtcgcttcatgtgactccacggagtaccgggcgccgtccaggcacctcgattagttctcgagcttttggagtacgtcgtctttaggttggggggaggggttttatgcgatggagtttccccacactgagtgggtggagactgaagttaggccagcttggcacttgatgtaattctccttggaatttgccctttttgagtttggatcttggttcattctcaagcctcagacagtggttcaaagtttttttcttccatttcaggtgtcgtgaggatccgcggccgcgccaccatggtgagcaagggcgaggagctgttcaccggggtggtgcccatcctggtcgagctggacggcgacgtaaacggccacaagttcagcgtgtccggcgagggcgagggcgatgccacctacggcaagctgaccctgaagttcatctgcaccaccggcaagctgcccgtgccctggcccaccctcgtgaccaccctgacctacggcgtgcagtgcttcagccgctaccccgaccacatgaagcagcacgacttcttcaagtccgccatgcccgaaggctacgtccaggagcgcaccatcttcttcaaggacgacggcaactacaagacccgcgccgaggtgaagttcgagggcgacaccctggtgaaccgcatcgagctgaagggcatcgacttcaaggaggacggcaacatcctggggcacaagctggagtacaactacaacagccacaacgtctatatcatggccgacaagcagaagaacggcatcaaggtgaacttcaagatccgccacaacatcgaggacggcagcgtgcagctcgccgaccactaccagcagaacacccccatcggcgacggccccgtgctgctgcccgacaaccactacctgagcacccagtccgccctgagcaaagaccccaacgagaagcgcgatcacatggtcctgctggagttcgtgaccgccgccgggatcactctcggcatggacgagctgtacaagtagtcgatagttgacccgtaccatgtcctaggaaacctgttaggtctaacttacctgatcttcggaagtgtgggctagcctagatcttactgacgtacgtttctggagccaatgatcttaagcttcaaaacgctggctctagtcgcaagatacgactaagcgctgtcgacgggtcctactcgtctctcaacctgctttgtcagttttttttcaattggagactaatgcggccggccattactcctctcgtgtcttgttgcaatgtctgctggtttgtttgatgttgtttgcgggcgggccctatagtgagtcgtatta

SEQ ID NO: 788 - DNA, 23 bp, synthetic construct
  source 1..23: mol_type = other DNA
gcggcctctagactcgaggcgtt

SEQ ID NO: 789 - DNA, 18 bp, synthetic construct
  source 1..18: mol_type = other DNA
ctctggctaactaccggt

SEQ ID NO: 790 - DNA, 21 bp, synthetic construct
  source 1..21: mol_type = other DNA
ccaaagaagaagcggaaggtc

SEQ ID NO: 791 - DNA, 2931 bp, synthetic construct
  source 1..2931: mol_type = other DNA
caagagatcaagagaatcaacaagatcagaaggagactggtcaaggacagcaacacaaagaaggccggcaagacaggccccatgaaaaccctgctcgtcagagtgatgacccctgacctgagagagcggctggaaaacctgagaaagaagcccgagaacatccctcagcctatcagcaacaccagcagggccaacctgaacaagctgctgaccgactacaccgagatgaagaaagccatcctgcacgtgtactgggaagagttccagaaagaccccgtgggcctgatgagcagagttgctcagcctgccagcaagaagatcgaccagaacaagctgaagcccgagatggacgagaagggcaatctgaccacagccggctttgcctgctctcagtgtggccagcctctgttcgtgtacaagctggaacaggtgtccgagaaaggcaaggcctacaccaactacttcggcagatgtaacgtggccgagcacgagaagctgattctgctggcccagctgaaacctgagaaggactctgatgaggccgtgacctacagcctgggcaagtttggacagagagccctggacttctacagcatccacgtgaccaaagaaagcacacaccccgtgaagcccctggctcagatcgccggcaatagatacgcctctggacctgtgggcaaagccctgtccgatgcctgcatgggaacaatcgccagcttcctgagcaagtaccaggacatcatcatcgagcaccagaaggtggtcaagggcaaccagaagagactggaaagcctgagggagctggccggcaaagagaacctggaataccccagcgtgaccctgcctcctcagcctcacacaaaagaaggcgtggacgcctacaacgaagtgatcgccagagtgagaatgtgggtcaacctgaacctgtggcagaagctgaaactgtccagggacgacgccaagcctctgctgagactgaagggcttccctagcttccctctggtggaaagacaggccaatgaagtggattggtgggacatggtctgcaacgtgaagaagctgatcaacgagaagaaagaggatggcaaggttttctggcagaacctggccggctacaagagacaagaagccctgaggccttacctgagcagcgaagaggaccggaagaagggcaagaagttcgccagataccagctgggcgacctgctgctgcacctggaaaagaagcacggcgaggactggggcaaagtgtacgatgaggcctgggagagaatcgacaagaaggtggaaggcctgagcaagcacattaagctggaagaggaaagaaggagcgaggacgcccaatctaaagccgctctgaccgattggctgagagccaaggccagctttgtgatcgagggcctgaaagaggccgacaaggacgagttctgcagatgcgagctgaagctgcagaagtggtacggcgatctgagaggcaagcccttcgccattgaggccgagaacagcatcctggacatcagcggcttcagcaagcagtacaactgcgccttcatttggcagaaagacggcgtcaagaaactgaacctgtacctgatcatcaattacttcaaaggcggcaagctgcggttcaagaagatcaaacccgaggccttcgaggctaacagattctacaccgtgatcaacaaaaagtccggcgagatcgtgcccatggaagtgaacttcaacttcgacgaccccaacctgattatcctgcctctggccttcggcaagagacagggcagagagttcatctggaacgatctgctgagcctggaaaccggctctctgaagctggccaatggcagagtgatcgagaaaaccctgtacaacaggagaaccagacaggacgagcctgctctgtttgtggccctgaccttcgagagaagagaggtgctggacagcagcaacatcaagcccatgaacctgatcggcgtggaccggggcgagaatatccctgctgtgatcgccctgacagaccctgaaggatgcccactgagcagattcaaggactccctgggcaaccctacacacatcctgagaatcggcgagagctacaaagagaagcagaggacaatccaggccaagaaagaggtggaacagcgcagagccggcggatactctaggaagtacgccagcaaggccaagaatctggccgacgacatggtccgaaacaccgccagagatctgctgtactacgccgtgacacaggacgccatgctgatcttcgagaatctgagcagaggcttcggccggcagggcaagagaacctttatggccgagaggcagtacaccagaatggaagattggctcacagctaaactggcctacgagggactgagcaagacctacctgtccaaaacactggcccagtatacctccaagacctgcagcaattgcggcttcaccatcaccagcgccgactacgacagagtgctggaaaagctcaagaaaaccgccaccggctggatgaccaccatcaacggcaaagagctgaaggttgagggccagatcacctactacaacaggtacaagaggcagaacgtcgtgaaggatctgagcgtggaactggacagactgagcgaagagagcgtgaacaacgacatcagcagctggacaaagggcagatcaggcgaggctctgagcctgctgaagaagaggtttagccacagacctgtgcaagagaagttcgtgtgcctgaactgcggcttcgagacacacgccgatgaacaggctgccctgaacattgccagaagctggctgttcctgagaagccaagagtacaagaagtaccagaccaacaagaccaccggcaacaccgacaagagggcctttgtggaaacctggcagagcttctacagaaaaaagctgaaagaagtctggaagcccgccgtg

SEQ ID NO: 792 - DNA, 21 bp, synthetic construct
  source 1..21: mol_type = other DNA
ccaaaaaagaagagaaaggta

SEQ ID NO: 793 - DNA, 27 bp, synthetic construct
  source 1..27: mol_type = other DNA
tacccatatgatgtccctgactacgct

SEQ ID NO: 794 - DNA, 30 bp, synthetic construct
  source 1..30: mol_type = other DNA
gaattcctagagctcgctgatcagcctcga

SEQ ID NO: 795 - DNA, 20 bp, synthetic construct
  source 1..20: mol_type = other DNA
ggccgagatgtctcgctccg

SEQ ID NO: 796 - DNA, 17 bp, synthetic construct
  source 1..17: mol_type = other DNA
ttttttttggcggccgc

SEQ ID NO: 797 - DNA, 2525 bp, synthetic construct
  source 1..2525: mol_type = other DNA
gggcagagcgcacatcgcccacagtccccgagaagttggggggaggggtcggcaattgaaccggtgcctagagaaggtggcgcggggtaaactgggaaagtgatgtcgtgtactggctccgcctttttcccgagggtgggggagaaccgtatataagtgcagtagtcgccgtgaacgttctttttcgcaacgggtttgccgccagaacacaggtaagtgccgtgtgtggttcccgcgggcctggcctctttacgggttatggcccttgcgtgccttgaattacttccacctggctgcagtacgtgattcttgatcccgagcttcgggttggaagtgggtgggagagttcgaggccttgcgcttaaggagccccttcgcctcgtgcttgagttgaggcctggcctgggcgctggggccgccgcgtgcgaatctggtggcaccttcgcgcctgtctcgctgctttcgataagtctctagccatttaaaatttttgatgacctgctgcgacgctttttttctggcaagatagtcttgtaaatgcgggccaagatctgcacactggtatttcggtttttggggccgcgggcggcgacggggcccgtgcgtcccagcgcacatgttcggcgaggcggggcctgcgagcgcggccaccgagaatcggacgggggtagtctcaagctggccggcctgctctggtgcctggcctcgcgccgccgtgtatcgccccgccctgggcggcaaggctggcccggtcggcaccagttgcgtgagcggaaagatggccgcttcccggccctgctgcagggagctcaaaatggaggacgcggcgctcgggagagcgggcgggtgagtcacccacacaaaggaaaagggcctttccgtcctcagccgtcgcttcatgtgactccacggagtaccgggcgccgtccaggcacctcgattagttctcgagcttttggagtacgtcgtctttaggttggggggaggggttttatgcgatggagtttccccacactgagtgggtggagactgaagttaggccagcttggcacttgatgtaattctccttggaatttgccctttttgagtttggatcttggttcattctcaagcctcagacagtggttcaaagtttttttcttccatttcaggtgtcgtgaggatccgcggccgcgccaccatggtgagcaagggcgaggagctgttcaccggggtggtgcccatcctggtcgagctggacggcgacgtaaacggccacaagttcagcgtgtccggcgagggcgagggcgatgccacctacggcaagctgaccctgaagttcatctgcaccaccggcaagctgcccgtgccctggcccaccctcgtgaccaccctgacctacggcgtgcagtgcttcagccgctaccccgaccacatgaagcagcacgacttcttcaagtccgccatgcccgaaggctacgtccaggagcgcaccatcttcttcaaggacgacggcaactacaagacccgcgccgaggtgaagttcgagggcgacaccctggtgaaccgcatcgagctgaagggcatcgacttcaaggaggacggcaacatcctggggcacaagctggagtacaactacaacagccacaacgtctatatcatggccgacaagcagaagaacggcatcaaggtgaacttcaagatccgccacaacatcgaggacggcagcgtgcagctcgccgaccactaccagcagaacacccccatcggcgacggccccgtgctgctgcccgacaaccactacctgagcacccagtccgccctgagcaaagaccccaacgagaagcgcgatcacatggtcctgctggagttcgtgaccgccgccgggatcactctcggcatggacgagctgtacaagtagtcgatagttgacccgtaccatgtcctaggcaacagaaggctaaagaaggtatattgctgttgacagtgagcgacgtacctgatcatcaattaactgtgaagccacagatgggttaattgatgatcaggtacgctgcctactgcctcggacttcaaggggctactttaggagcaattatcctaggaaacctgttaggtctaacttacctgatcttcggaagtgtgggctagccaacagaaggctaaagaaggtatattgctgttgacagtgagcgacgtacctgatcatcaattaactgtgaagccacagatgggttaattgatgatcaggtacgctgcctactgcctcggacttcaaggggctactttaggagcaattatgctagcctagatcttactgacgtacgtttctggagccaatgatcttaagcttcaaaacgctggctctagtcgcaagatacgactaagcgctgtcgacgggtcctactcgtctctcaacctgctttgtcagttttttttcaattggagactaatgcggccggccattactcctctcgtgtcttgttgcaatgtctgctggtttgtttgatgttgtttgcgggcgggccctatagtgagtcgtatta

SEQ ID NO: 798 - DNA, 2525 bp, synthetic construct
  source 1..2525: mol_type = other DNA
gggcagagcgcacatcgcccacagtccccgagaagttggggggaggggtcggcaattgaaccggtgcctagagaaggtggcgcggggtaaactgggaaagtgatgtcgtgtactggctccgcctttttcccgagggtgggggagaaccgtatataagtgcagtagtcgccgtgaacgttctttttcgcaacgggtttgccgccagaacacaggtaagtgccgtgtgtggttcccgcgggcctggcctctttacgggttatggcccttgcgtgccttgaattacttccacctggctgcagtacgtgattcttgatcccgagcttcgggttggaagtgggtgggagagttcgaggccttgcgcttaaggagccccttcgcctcgtgcttgagttgaggcctggcctgggcgctggggccgccgcgtgcgaatctggtggcaccttcgcgcctgtctcgctgctttcgataagtctctagccatttaaaatttttgatgacctgctgcgacgctttttttctggcaagatagtcttgtaaatgcgggccaagatctgcacactggtatttcggtttttggggccgcgggcggcgacggggcccgtgcgtcccagcgcacatgttcggcgaggcggggcctgcgagcgcggccaccgagaatcggacgggggtagtctcaagctggccggcctgctctggtgcctggcctcgcgccgccgtgtatcgccccgccctgggcggcaaggctggcccggtcggcaccagttgcgtgagcggaaagatggccgcttcccggccctgctgcagggagctcaaaatggaggacgcggcgctcgggagagcgggcgggtgagtcacccacacaaaggaaaagggcctttccgtcctcagccgtcgcttcatgtgactccacggagtaccgggcgccgtccaggcacctcgattagttctcgagcttttggagtacgtcgtctttaggttggggggaggggttttatgcgatggagtttccccacactgagtgggtggagactgaagttaggccagcttggcacttgatgtaattctccttggaatttgccctttttgagtttggatcttggttcattctcaagcctcagacagtggttcaaagtttttttcttccatttcaggtgtcgtgaggatccgcggccgcgccaccatggtgagcaagggcgaggagctgttcaccggggtggtgcccatcctggtcgagctggacggcgacgtaaacggccacaagttcagcgtgtccggcgagggcgagggcgatgccacctacggcaagctgaccctgaagttcatctgcaccaccggcaagctgcccgtgccctggcccaccctcgtgaccaccctgacctacggcgtgcagtgcttcagccgctaccccgaccacatgaagcagcacgacttcttcaagtccgccatgcccgaaggctacgtccaggagcgcaccatcttcttcaaggacgacggcaactacaagacccgcgccgaggtgaagttcgagggcgacaccctggtgaaccgcatcgagctgaagggcatcgacttcaaggaggacggcaacatcctggggcacaagctggagtacaactacaacagccacaacgtctatatcatggccgacaagcagaagaacggcatcaaggtgaacttcaagatccgccacaacatcgaggacggcagcgtgcagctcgccgaccactaccagcagaacacccccatcggcgacggccccgtgctgctgcccgacaaccactacctgagcacccagtccgccctgagcaaagaccccaacgagaagcgcgatcacatggtcctgctggagttcgtgaccgccgccgggatcactctcggcatggacgagctgtacaagtagtcgatagttgacccgtaccatgtcctaggcaacagaaggctaaagaaggtatattgctgttgacagtgagcgacgtacctgatcatcaattaactgtgaagccacagatgggttaattgatgatcaggtacgctgcctactgcctcggacttcaaggggctactttaggagcaattatcctaggaaacctgttaggtctaacttacctgatcttcggaagtgtgggctagccaacagaaggctaaagaaggtatattgctgttgacagtgagcgacggatcaacgagaagaaagactgtgaagccacagatgggtctttcttctcgttgatccgctgcctactgcctcggacttcaaggggctactttaggagcaattatgctagcctagatcttactgacgtacgtttctggagccaatgatcttaagcttcaaaacgctggctctagtcgcaagatacgactaagcgctgtcgacgggtcctactcgtctctcaacctgctttgtcagttttttttcaattggagactaatgcggccggccattactcctctcgtgtcttgttgcaatgtctgctggtttgtttgatgttgtttgcgggcgggccctatagtgagtcgtatta

SEQ ID NO: 799 - DNA, 2525 bp, synthetic construct
  source 1..2525: mol_type = other DNA
gggcagagcgcacatcgcccacagtccccgagaagttggggggaggggtcggcaattgaaccggtgcctagagaaggtggcgcggggtaaactgggaaagtgatgtcgtgtactggctccgcctttttcccgagggtgggggagaaccgtatataagtgcagtagtcgccgtgaacgttctttttcgcaacgggtttgccgccagaacacaggtaagtgccgtgtgtggttcccgcgggcctggcctctttacgggttatggcccttgcgtgccttgaattacttccacctggctgcagtacgtgattcttgatcccgagcttcgggttggaagtgggtgggagagttcgaggccttgcgcttaaggagccccttcgcctcgtgcttgagttgaggcctggcctgggcgctggggccgccgcgtgcgaatctggtggcaccttcgcgcctgtctcgctgctttcgataagtctctagccatttaaaatttttgatgacctgctgcgacgctttttttctggcaagatagtcttgtaaatgcgggccaagatctgcacactggtatttcggtttttggggccgcgggcggcgacggggcccgtgcgtcccagcgcacatgttcggcgaggcggggcctgcgagcgcggccaccgagaatcggacgggggtagtctcaagctggccggcctgctctggtgcctggcctcgcgccgccgtgtatcgccccgccctgggcggcaaggctggcccggtcggcaccagttgcgtgagcggaaagatggccgcttcccggccctgctgcagggagctcaaaatggaggacgcggcgctcgggagagcgggcgggtgagtcacccacacaaaggaaaagggcctttccgtcctcagccgtcgcttcatgtgactccacggagtaccgggcgccgtccaggcacctcgattagttctcgagcttttggagtacgtcgtctttaggttggggggaggggttttatgcgatggagtttccccacactgagtgggtggagactgaagttaggccagcttggcacttgatgtaattctccttggaatttgccctttttgagtttggatcttggttcattctcaagcctcagacagtggttcaaagtttttttcttccatttcaggtgtcgtgaggatccgcggccgcgccaccatggtgagcaagggcgaggagctgttcaccggggtggtgcccatcctggtcgagctggacggcgacgtaaacggccacaagttcagcgtgtccggcgagggcgagggcgatgccacctacggcaagctgaccctgaagttcatctgcaccaccggcaagctgcccgtgccctggcccaccctcgtgaccaccctgacctacggcgtgcagtgcttcagccgctaccccgaccacatgaagcagcacgacttcttcaagtccgccatgcccgaaggctacgtccaggagcgcaccatcttcttcaaggacgacggcaactacaagacccgcgccgaggtgaagttcgagggcgacaccctggtgaaccgcatcgagctgaagggcatcgacttcaaggaggacggcaacatcctggggcacaagctggagtacaactacaacagccacaacgtctatatcatggccgacaagcagaagaacggcatcaaggtgaacttcaagatccgccacaacatcgaggacggcagcgtgcagctcgccgaccactaccagcagaacacccccatcggcgacggccccgtgctgctgcccgacaaccactacctgagcacccagtccgccctgagcaaagaccccaacgagaagcgcgatcacatggtcctgctggagttcgtgaccgccgccgggatcactctcggcatggacgagctgtacaagtagtcgatagttgacccgtaccatgtcctaggcaacagaaggctaaagaaggtatattgctgttgacagtgagcgacgtacctgatcatcaattaactgtgaagccacagatgggttaattgatgatcaggtacgctgcctactgcctcggacttcaaggggctactttaggagcaattatcctaggaaacctgttaggtctaacttacctgatcttcggaagtgtgggctagccaacagaaggctaaagaaggtatattgctgttgacagtgagcgacggaagagttccagaaagaactgtgaagccacagatgggttctttctggaactcttccgctgcctactgcctcggacttcaaggggctactttaggagcaattatgctagcctagatcttactgacgtacgtttctggagccaatgatcttaagcttcaaaacgctggctctagtcgcaagatacgactaagcgctgtcgacgggtcctactcgtctctcaacctgctttgtcagttttttttcaattggagactaatgcggccggccattactcctctcgtgtcttgttgcaatgtctgctggtttgtttgatgttgtttgcgggcgggccctatagtgagtcgtatta

SEQ ID NO: 800 - DNA, 2525 bp, synthetic construct
  source 1..2525: mol_type = other DNA
gggcagagcgcacatcgcccacagtccccgagaagttggggggaggggtcggcaattgaaccggtgcctagagaaggtggcgcggggtaaactgggaaagtgatgtcgtgtactggctccgcctttttcccgagggtgggggagaaccgtatataagtgcagtagtcgccgtgaacgttctttttcgcaacgggtttgccgccagaacacaggtaagtgccgtgtgtggttcccgcgggcctggcctctttacgggttatggcccttgcgtgccttgaattacttccacctggctgcagtacgtgattcttgatcccgagcttcgggttggaagtgggtgggagagttcgaggccttgcgcttaaggagccccttcgcctcgtgcttgagttgaggcctggcctgggcgctggggccgccgcgtgcgaatctggtggcaccttcgcgcctgtctcgctgctttcgataagtctctagccatttaaaatttttgatgacctgctgcgacgctttttttctggcaagatagtcttgtaaatgcgggccaagatctgcacactggtatttcggtttttggggccgcgggcggcgacggggcccgtgcgtcccagcgcacatgttcggcgaggcggggcctgcgagcgcggccaccgagaatcggacgggggtagtctcaagctggccggcctgctctggtgcctggcctcgcgccgccgtgtatcgccccgccctgggcggcaaggctggcccggtcggcaccagttgcgtgagcggaaagatggccgcttcccggccctgctgcagggagctcaaaatggaggacgcggcgctcgggagagcgggcgggtgagtcacccacacaaaggaaaagggcctttccgtcctcagccgtcgcttcatgtgactccacggagtaccgggcgccgtccaggcacctcgattagttctcgagcttttggagtacgtcgtctttaggttggggggaggggttttatgcgatggagtttccccacactgagtgggtggagactgaagttaggccagcttggcacttgatgtaattctccttggaatttgccctttttgagtttggatcttggttcattctcaagcctcagacagtggttcaaagtttttttcttccatttcaggtgtcgtgaggatccgcggccgcgccaccatggtgagcaagggcgaggagctgttcaccggggtggtgcccatcctggtcgagctggacggcgacgtaaacggccacaagttcagcgtgtccggcgagggcgagggcgatgccacctacggcaagctgaccctgaagttcatctgcaccaccggcaagctgcccgtgccctggcccaccctcgtgaccaccctgacctacggcgtgcagtgcttcagccgctaccccgaccacatgaagcagcacgacttcttcaagtccgccatgcccgaaggctacgtccaggagcgcaccatcttcttcaaggacgacggcaactacaagacccgcgccgaggtgaagttcgagggcgacaccctggtgaaccgcatcgagctgaagggcatcgacttcaaggaggacggcaacatcctggggcacaagctggagtacaactacaacagccacaacgtctatatcatggccgacaagcagaagaacggcatcaaggtgaacttcaagatccgccacaacatcgaggacggcagcgtgcagctcgccgaccactaccagcagaacacccccatcggcgacggccccgtgctgctgcccgacaaccactacctgagcacccagtccgccctgagcaaagaccccaacgagaagcgcgatcacatggtcctgctggagttcgtgaccgccgccgggatcactctcggcatggacgagctgtacaagtagtcgatagttgacccgtaccatgtcctaggcaacagaaggctaaagaaggtatattgctgttgacagtgagcgacggatcaacgagaagaaagactgtgaagccacagatgggtctttcttctcgttgatccgctgcctactgcctcggacttcaaggggctactttaggagcaattatcctaggaaacctgttaggtctaacttacctgatcttcggaagtgtgggctagccaacagaaggctaaagaaggtatattgctgttgacagtgagcgacggaagagttccagaaagaactgtgaagccacagatgggttctttctggaactcttccgctgcctactgcctcggacttcaaggggctactttaggagcaattatgctagcctagatcttactgacgtacgtttctggagccaatgatcttaagcttcaaaacgctggctctagtcgcaagatacgactaagcgctgtcgacgggtcctactcgtctctcaacctgctttgtcagttttttttcaattggagactaatgcggccggccattactcctctcgtgtcttgttgcaatgtctgctggtttgtttgatgttgtttgcgggcgggccctatagtgagtcgtatta

SEQ ID NO: 801 - DNA, 2370 bp, synthetic construct; identical to SEQ ID NO: 782
  source 1..2370: mol_type = other DNA

SEQ ID NO: 802 - DNA, 2370 bp, synthetic construct; identical to SEQ ID NO: 785
  source 1..2370: mol_type = other DNA

SEQ ID NO: 803 - DNA, 2370 bp, synthetic construct; identical to SEQ ID NO: 786
  source 1..2370: mol_type = other DNA

SEQ ID NO: 804 - DNA, 2525 bp, synthetic construct; identical to SEQ ID NO: 797
  source 1..2525: mol_type = other DNA

SEQ ID NO: 805 - DNA, 2525 bp, synthetic construct; identical to SEQ ID NO: 798
  source 1..2525: mol_type = other DNA

SEQ ID NO: 806 - DNA, 2525 bp, synthetic construct; identical to SEQ ID NO: 799
  source 1..2525: mol_type = other DNA

SEQ ID NO: 807 - DNA, 2525 bp, synthetic construct; identical to SEQ ID NO: 800
  source 1..2525: mol_type = other DNA

SEQ ID NO: 808 - DNA, 24 bp, synthetic construct
  source 1..24: mol_type = other DNA
aaaccacaactagaatgcagtgaa

SEQ ID NO: 809 - DNA, 24 bp, synthetic construct
  source 1..24: mol_type = other DNA
aaaccacaactagaatgcagtgag

SEQ ID NO: 810 - DNA, 24 bp, synthetic construct
  source 1..24: mol_type = other DNA
aaaccacaactagaatgcagtgat

SEQ ID NO: 811 - DNA, 24 bp, synthetic construct
  source 1..24: mol_type = other DNA
aaaccacaactagaatgcagtgac

SEQ ID NO: 812 - DNA, 24 bp, synthetic construct
  source 1..24: mol_type = other DNA
aaaccacaactagaatgcagtgac

SEQ ID NO: 813 - DNA, 380 bp, synthetic construct
  source 1..380: mol_type = other DNA
gacattgattattgactagttattaatagtaatcaattacggggtcattagttcatagcccatatatggagttccgcgttacataacttacggtaaatggcccgcctggctgaccgcccaacgacccccgcccattgacgtcaataatgacgtatgttcccatagtaacgccaatagggactttccattgacgtcaatgggtggagtatttacggtaaactgcccacttggcagtacatcaagtgtatcatatgccaagtacgccccctattgacgtcaatgacggtaaatggcccgcctggcattatgcccagtacatgaccttatgggactttcctacttggcagtacatctacgtattagtcatcgctattaccatg

SEQ ID NO: 814 - DNA, 15 bp, synthetic construct
  source 1..15: mol_type = other DNA
ctctggctaactacc

SEQ ID NO: 815 - DNA, 98 bp, synthetic construct
  source 1..98: mol_type = other DNA
actggcacttctatctgattactctgagagccatcaccagcgactatgtcgtatgggtaaagccgcttacggacttcggtccgtaagaggcatcagag

SEQ ID NO: 816 - DNA, 89 bp, synthetic construct
  source 1..89: mol_type = other DNA
actggcacttctatctgattactctgagagccatcaccagcgactatgtcgtagtgggtaaagctccctcttcggagggagcatcagag

SEQ ID NO: 817 - DNA, 98 bp, synthetic construct
  source 1..98: mol_type = other DNA
actggcacctttatctgattactttgagagccatcaccagcgactatgtcgtatgggtaaagccgcttacggacttcggtccgtaagaggcatcaaag

SEQ ID NO: 818 - DNA, 98 bp, synthetic construct
  source 1..98: mol_type = other DNA
actggcacttgtatctgattactctgagagccatcaccagcgactatgtcgtatgggtaaagccgcttacggacttcggtccgtaagaggcatcagag

SEQ ID NO: 819 - DNA, 89 bp, synthetic construct
  source 1..89: mol_type = other DNA
actggcacttgtatctgattactctgagagccatcaccagcgactatgtcgtagtgggtaaagctccctcttcggagggagcatcagag

SEQ ID NO: 820 - DNA, 97 bp, synthetic construct; identical to SEQ ID NO: 692
  source 1..97: mol_type = other DNA

SEQ ID NO: 821 - DNA, 97 bp, synthetic construct
  source 1..97: mol_type = other DNA
actggcacttctatctgattactctgagagccatcaccagcgactatgtcgtatgggtaaagcgcttacggacttcggtccgtaagaagcatcagag

SEQ ID NO: 822 - DNA, 98 bp, synthetic construct; identical to SEQ ID NO: 694
  source 1..98: mol_type = other DNA

SEQ ID NO: 823 - DNA, 98 bp, synthetic construct; identical to SEQ ID NO: 695
  source 1..98: mol_type = other DNA

SEQ ID NO: 824 - DNA, 98 bp, synthetic construct; identical to SEQ ID NO: 696
  source 1..98: mol_type = other DNA

SEQ ID NO: 825 - DNA, 98 bp, synthetic construct; identical to SEQ ID NO: 697
  source 1..98: mol_type = other DNA

SEQ ID NO: 826 - DNA, 99 bp, synthetic construct; identical to SEQ ID NO: 698
  source 1..99: mol_type = other DNA

SEQ ID NO: 827 - DNA, 98 bp, synthetic construct; identical to SEQ ID NO: 699
  source 1..98: mol_type = other DNA

SEQ ID NO: 828 - DNA, 98 bp, synthetic construct; identical to SEQ ID NO: 700
  source 1..98: mol_type = other DNA

SEQ ID NO: 829 - DNA, 12 bp, synthetic construct
  source 1..12: mol_type = other DNA
ggtgccaccatg

SEQ ID NO: 830 - DNA, 20 bp, synthetic construct
  source 1..20: mol_type = other DNA
cgaagagcaattgctcttcg

SEQ ID NO: 831 - DNA, 24 bp, synthetic construct
  source 1..24: mol_type = other DNA
ctctggctaactaccggtgccacc

SEQ ID NO: 832 - DNA, 21 bp, synthetic construct
  source 1..21: mol_type = other DNA
ccaaagaagaagcggaaggtg

SEQ ID NO: 833 - DNA, 36 bp, synthetic construct
  source 1..36: mol_type = other DNA
tacccatatgatgtccctgactacgctggatcctaa

SEQ ID NO: 834 - DNA, 19 bp, synthetic construct
  source 1..19: mol_type = other DNA
gcggcctctagactcgagg

SEQ ID NO: 835 - DNA, 825 bp, synthetic construct
  source 1..825: mol_type = other DNA
agatcttccccacctagccacctggcaaactgctccttctctcaaaggcccaaacatggcctcccagactgcaacccccaggcagtcaggccctgtctccacaacctcacagccaccctggacggaatctgcttcttcccacatttgagtcctcctcagcccctgagctcctctgggcagggctgtttctttccatctttgtattcccaggggcctgcaaataaatgtttaatgaacgaacaagagagtgaattccaattccatgcaacaaggattgggctcctgggccctaggctatgtgtctggcaccagaaacggaagctgcaggttgcagcccctgccctcatggagctcctcctgtcagaggagtgtggggactggatgactccagaggtaacttgtgggggaacgaacaggtaaggggctgtgtgacgagatgagagactgggagaataaaccagaaagtctctagctgtccagaggacatagcacagaggcccatggtccctatttcaaacccaggccaccagactgagctgggaccttgggacagacaagtcatgcagaagttaggggaccttctcctcccttttcctggatcctgagtacctctcctccctgacctcaggcttcctcctagtgtcaccttggcccctcttagaagccaattaggccctcagtttctgcagcggggattaatatgattatgaacacccccaatctcccagatgctgattcagccaggagcttaggagggggaggtcactttataagggtctgggggggtcagaacccagagtcatcccctgaattctgcagatatcc

SEQ ID NO: 836 - DNA, 782 bp, synthetic construct
  source 1..782: mol_type = other DNA
aaaggcccaaacatggcctcccagactgcaacccccaggcagtcaggccctgtctccacaacctcacagccaccctggacggaatctgcttcttcccacatttgagtcctcctcagcccctgagctcctctgggcagggctgtttctttccatctttgtattcccaggggcctgcaaataaatgtttaatgaacgaacaagagagtgaattccaattccatgcaacaaggattgggctcctgggccctaggctatgtgtctggcaccagaaacggaagctgcaggttgcagcccctgccctcatggagctcctcctgtcagaggagtgtggggactggatgactccagaggtaacttgtgggggaacgaacaggtaaggggctgtgtgacgagatgagagactgggagaataaaccagaaagtctctagctgtccagaggacatagcacagaggcccatggtccctatttcaaacccaggccaccagactgagctgggaccttgggacagacaagtcatgcagaagttaggggaccttctcctcccttttcctggatcctgagtacctctcctccctgacctcaggcttcctcctagtgtcaccttggcccctcttagaagccaattaggccctcagtttctgcagcggggattaatatgattatgaacacccccaatctcccagatgctgattcagccaggagcttaggagggggaggtcactttataagggtctgggggggtcagaacccagagtcatcccctgaattctgcagatatcc

SEQ ID NO: 837 - DNA, 39 bp, synthetic construct
  source 1..39: mol_type = other DNA
actaccggtatcaaaggggctccgcaccacgccgccacc

SEQ ID NO: 838 - DNA, 27 bp, synthetic construct
  source 1..27: mol_type = other DNA
ccagcggccaaacgggtgaagctggac

SEQ ID NO: 839 - DNA, 27 bp, synthetic construct
  source 1..27: mol_type = other DNA
cccgccgcgaagcgagtgaaactggac

SEQ ID NO: 840 - DNA, 54 bp, synthetic construct
  source 1..54: mol_type = other DNA
gaattcctagagctcgctgatcagcctcgaatcaaaggggctccgcaccacgcc

SEQ ID NO: 841 - DNA, 20 bp, synthetic construct
  source 1..20: mol_type = other DNA
aaggggctccgcaccacgcc

SEQ ID NO: 842 - DNA, 37 bp, synthetic construct
  source 1..37: mol_type = other DNA
ctctggctaactaatcactgcattctagttgtggttt

SEQ ID NO: 843 - DNA, 54 bp, synthetic construct
  source 1..54: mol_type = other DNA
gaattcctagagctcgctgatcagcctcgaatcactgcattctagttgtggttt

SEQ ID NO: 844 - protein, 43 aa, synthetic construct
GGGPGGGAAAGSGSPKKKRKVGSGSKRPAATKKAGQAKKKKLE

SEQ ID NO: 845 - protein, 12 aa, synthetic construct
PPPPAAKRVKLD

SEQ ID NO: 846 - protein, 24 aa, synthetic construct
PPPGGGSGGGSGGGSPAAKRVKLD

SEQ ID NO: 847-2100 - skipped (1254 entries)

SEQ ID NO: 2101 - RNA, 108 nt, synthetic construct
  source 1..108: mol_type = other RNA
tactggcgcttttatctcattactttgagagccatcaccagcgactatgtcgtatgggtaaagcgcaggtgggacgacctctcggtcgtcctatctgaagcatcaaag

SEQ ID NO: 2102 - RNA, 99 nt, synthetic construct
  source 1..99: mol_type = other RNA
tactggcgcttttatctcattactttgagagccatcaccagcgactatgtcgtatgggtaaagcgctgctcgacgcgtcctcgagcagaagcatcaaag

SEQ ID NO: 2103 - RNA, 97 nt, synthetic construct
  source 1..97: mol_type = other RNA
tactggcgcttttatctcattactttgagagccatcaccagcgactatgtcgtatgggtaaagcgctgctcgctccgttcgagcagaagcatcaaag

SEQ ID NO: 2104 - RNA, 91 nt, synthetic construct
  source 1..91: mol_type = other RNA
gtactggcgcttttatctcattactttgagagccatcaccagcgactatgtcgtatgggtaaagcgccctcttcggagggaagcatcaaag

SEQ ID NO: 2105 - RNA, 99 nt, synthetic construct
  source 1..99: mol_type = other RNA
tactggcgcttttatctcattactttgagagccatcaccagcgactatgtcgtatgggtaaagcgcaggagtttctatggaaaccctgaagcatcaaag

SEQ ID NO: 2106 - RNA, 99 nt, synthetic construct
  source 1..99: mol_type = other RNA
gtactggcgcctttatctcattactttgagagccatcaccagcgactatgtcgtatgggtaaagcgcttacggacttcggtccgtaagaagcatcaaag

SEQ ID NO: 2107 - RNA, 90 nt, synthetic construct
  source 1..90: mol_type = other RNA
tactggcgcttttatctcattactttgagagccatcaccagcgactatgtcgtatgggtaaagcgctgcgcttgcgcagaagcatcaaag

SEQ ID NO: 2108 - RNA, 108 nt, synthetic construct
  source 1..108: mol_type = other RNA
tactggcgcttttatctgattactttgagagccatcaccagcgactatgtcgtatgggtaaagcgcttatttatcggagagaaatccgataaataagaagcatcaaag

SEQ ID NO: 2109 - RNA, 108 nt, synthetic construct
  source 1..108: mol_type = other RNA
tactggcgcttttatcgcattactttgagagccatcaccagcgactatgtcgtatgggtaaagcgcttatttatcggagagaaatccgataaataagaagcatcaaag

SEQ ID NO: 2110 - RNA, 110 nt, synthetic construct
  source 1..110: mol_type = other RNA
tactggcgcttttatctcattactttgagagccatcaccagcgactatgtcgtatgggtaaagcgcttatttatcggagacttcggtccgataaataagaagcatcaaag

SEQ ID NO: 2111 - RNA, 96 nt, synthetic construct
  source 1..96: mol_type = other RNA
tactggcgcttttatctcattactttgagagccatcaccagcgactatgtcgtatgggtaaagcgcacatgaggatacccatgtgaagcatcaaag

SEQ ID NO: 2112 - RNA, 106 nt, synthetic construct
  source 1..106: mol_type = other RNA
gctggcgcttttatctcattactttgagagccatcaccagcgactatgtcgtatgggtaaagcgcttatttatcgtgagaaatccgataaataagaagcatcaaag

SEQ ID NO: 2113 - RNA, 96 nt, synthetic construct
  source 1..96: mol_type = other RNA
tactggcgcttttatctcattactttgagagccatcaccagcgactatgtcgtatgggtaaagcgctgcatgtctaagacagcagaagcatcaaag

SEQ ID NO: 2114 - RNA, 90 nt, synthetic construct
  source 1..90: mol_type = other RNA
tactggcgcttttatctcattactttgagagccatcaccagcgactatgtcgtatgggtaaagcgcagggcttcggccgaagcatcaaag

SEQ ID NO: 2115 - RNA, 98 nt, synthetic construct
  source 1..98: mol_type = other RNA
tactggcgcttttatctcattactttgagagccatcaccagcgactatgtcgtatgggtaaagcgcaatccattgcactccggattgaagcatcaaag

SEQ ID NO: 2116 - RNA, 108 nt, synthetic construct
  source 1..108: mol_type = other RNA
tactggcgcttttctcgcattactttgagagccatcaccagcgactatgtcgtatgggtaaagcgcttatttatcggagagaaatccgataaataagaagcatcaaag

SEQ ID NO: 2117 - RNA, 108 nt, synthetic construct
  source 1..108: mol_type = other RNA
tactggcgcttttatctcattactttgagagccatcaccagcgactatgtcgtatgggtaaagcgcttatttatcggacttcggtccgataaataagaagcatcaaag

SEQ ID NO: 2118 - RNA, 100 nt, synthetic construct
  source 1..100: mol_type = other RNA
tactggcgcttttatctcattactttgagagccatcaccagcgactatgtcgtatgggtaaagcgctgctcgtttgcggctacgagcagaagcatcaaag

SEQ ID NO: 2119 - RNA, 100 nt, synthetic construct
  source 1..100: mol_type = other RNA
tactggcgcttttatctcattactttgagagccatcaccagcgactatgtcgtatgggtaaagcgcttatttatcgagagataaataagaagcatcaaag

SEQ ID NO: 2120 - RNA, 107 nt, synthetic construct
  source 1..107: mol_type = other RNA
tacggcgcttttatctcattactttgagagccatcaccagcgactatgtcgtatgggtaaagcgcttatttatcggagagaaatccgataaataagaagcatcaaag

SEQ ID NO: 2121 - RNA, 99 nt, synthetic construct
  source 1..99: mol_type = other RNA
tactggcgccttttatctcattactttgagagccatcaccagcgactatgtcgtatgggtaaagcgcttacggacttcggtccgtaagaagcatcaaag

SEQ ID NO: 2122 - RNA, 108 nt, synthetic construct
  source 1..108: mol_type = other RNA
tactggcgcttttatctcattactttgagagccatcaccagcgactatgtcgtatcggtaaagcgcttatttatcggagagaaatccgataaataagaagcatcaaag

SEQ ID NO: 2123 - RNA, 108 nt, synthetic construct
  source 1..108: mol_type = other RNA
tactggcgcctttatctcattactttgagagccatcaccagcgactatgtcgtatgggtaaagcgcttatttatcggacttcggtccgataaataagaagcatcaaag

SEQ ID NO: 2124 - RNA, 105 nt, synthetic construct
  source 1..105: mol_type = other RNA
tactggcgcttttatctcattactttgagagccatcaccagcgactatgtcgtatgggtaaagcgcttatttatcgagaaatccgataaataagaagcatcaaag

SEQ ID NO: 2125 - RNA, 103 nt, synthetic construct
  source 1..103: mol_type = other RNA
gcgcttttatctcattactttgagagccatcaccagcgactatgtcgtatgggtaaagcgcttatttatcggagagaaatccgataaataagaagcatcaaag

SEQ ID NO: 2126 - RNA, 103 nt, synthetic construct
  source 1..103: mol_type = other RNA
tactggcgcttttatctcattactttgagagccatcaccagcgactatgtcgtatgggtaaagcgcttatttatcggagagagataaataagaagcatcaaag

SEQ ID NO: 2127 - RNA, 108 nt, synthetic construct
  source 1..108: mol_type = other RNA
tactggcgcttttatctcattactttggagagccatcaccagcgactatgtcgtatgggtaaagcgcttatttatcggagagtatccgataaataagaagcatcaaag

SEQ ID NO: 2128 - RNA, 109 nt, synthetic construct
  source 1..109: mol_type = other RNA
tactggcgcttttatctcattactttgagagccatcaccagcgactatgttcgtatgggtaaagcgcttatttatcggagagaaatccgataaataagaagcatcaaag

SEQ ID NO: 2129 - RNA, 105 nt, synthetic construct
  source 1..105: mol_type = other RNA
agcgcttttatctcattactttgagagccatcaccagcgactatgtcgtatgggtaaagcgcttatttatcggagagaaatgccgataaataagaagcatcaaag

SEQ ID NO: 2130 - RNA, 109 nt, synthetic construct
  source 1..109: mol_type = other RNA
tactggcgcttttatctcattactttgagagccatcaccagcgactatgtcgtatgggtaaagcgcttatttatcggagagaaatccgataaaataagaagcatcaaag

SEQ ID NO: 2131 - RNA, 109 nt, synthetic construct
  source 1..109: mol_type = other RNA
tactggcgcttttatctcattactttgagagccatcaccagcgactatgtcgtatgggtaaagcgcttattgtatcggagagaaatccgataaataagaagcatcaaag

SEQ ID NO: 2132 - RNA, 102 nt, synthetic construct
  source 1..102: mol_type = other RNA
gcgcttttatctcattactttgagagccatcaccagcgactatgtcgtatgggtaaagcgcttatttatcggacttcggtccgataaataagcgcatcaaag

SEQ ID NO: 2133 - RNA, 108 nt, synthetic construct
  source 1..108: mol_type = other RNA
tactggcgcttttctctcattactttgagagccatcaccagcgactatgtcgtatgggtaaagcgcttatttatcggagagaaatccgataaataagaagcatcaaag

SEQ ID NO: 2134 - RNA, 106 nt, synthetic construct
  source 1..106: mol_type = other RNA
gtggcgcttttatctcattactttgagagccatcaccagcgactatgtcgtatgggtaaagcgcttatttatcggagagaaatccgataaataagaagcatcaaag

SEQ ID NO: 2135 - RNA, 110 nt, synthetic construct
  source 1..110: mol_type = other RNA
tactggcgcttttatctcattactttgagagccatcaccagcgaccttatgtcgtatgggtaaagcgcttatttatcggagagaaatccgataaataagaagcatcaaag

SEQ ID NO: 2136 - RNA, 107 nt, synthetic construct
  source 1..107: mol_type = other RNA
gatggcgcttttatctcattactttgagagccatcaccagcgactatgtcgtatgggtaaagcgcttatttatcggacttcggtccgataaataagaagcatcaaag

SEQ ID NO: 2137 - RNA, 106 nt, synthetic construct
  source 1..106: mol_type = other RNA
tactggcgcttttatctcattactttgagagccatcaccagcgactatgtcgtatgggtaaagcgcttatttatcggagagaaatccgataaaagaagcatcaaag

SEQ ID NO: 2138 - RNA, 109 nt, synthetic construct
  source 1..109: mol_type = other RNA
tactggcgcttttatctcattactttgagagccatcaccagcgatctatgtcgtatgggtaaagcgcttatttatcggagagaaatccgataaataagaagcatcaaag

SEQ ID NO: 2139 - RNA, 106 nt, synthetic construct
  source 1..106: mol_type = other RNA
tactggcgcttttatctcattactttgagagccatcaccagcgactatgtcgtatgggtaaaggcttatttatcggagagaaatccgataaaaagaagcatcaaag

SEQ ID NO: 2140 - RNA, 107 nt, synthetic construct
  source 1..107: mol_type = other RNA
tactggcgcttttatctcattactttgagagccatcaccagcgactatgtcgtatgggtaaagcgcttatttatcggagagaaatccgataaaaagaagcatcaaag

SEQ ID NO: 2141 - RNA, 107 nt, synthetic construct
  source 1..107: mol_type = other RNA
tactggcgctttatctcattactttgagagccatcaccagcgactatgtcgtatgggtaaagcgcttatttatcggacttcggtccgataaataagaagcatcaaag

SEQ ID NO: 2142 - RNA, 98 nt, synthetic construct
  source 1..98: mol_type = other RNA
cggcgcttttctcgcattactttgagagccatcaccagcgactatgtcgtatgggtaaagcgcttattgtatcgagagataaataagaagcatcaaag

SEQ ID NO: 2143 - RNA, 107 nt, synthetic construct
  source 1..107: mol_type = other RNA
cactggcgcttttatctcattactttgagagccatcaccagcgactatgtcgtatgggtaaagcgcttattttcggagagaaatccgataaataagaagcatcaaag

SEQ ID NO: 2144 - RNA, 106 nt, synthetic construct
  source 1..106: mol_type = other RNA
tactggcgctttatctcattactttgagagccatcaccagcgacttcggtcgtatgggtaaagcgcttatgtatcggcttcggccgatacataagaagcatcaaag

SEQ ID NO: 2145 - RNA, 107 nt, synthetic construct
  source 1..107: mol_type = other RNA
tactggcgcttttatctcattactttgagagccatcaccagcgacttcggtcgtatgggtaaagcgcttatgtatcggcttcggccgatacataagaagcatcaaag

SEQ ID NO: 2146 - RNA, 109 nt, synthetic construct
  source 1..109: mol_type = other RNA
tactggcgcttttatctcattactttgagagccatcaccagcgactatgtcgtatgggtgaaagcgcttatttatcggagagaaatccgataaataagaagcatcaaag

SEQ ID NO: 2147 - RNA, 64 nt, synthetic construct
  source 1..64: mol_type = other RNA
tactggcgcttttatctcattactttgagagccatcaccagcgacttcggtcgtatgggtaaag

SEQ ID NO: 2148 - RNA, 62 nt, synthetic construct
  source 1..62: mol_type = other RNA
gatgggcttttatctcattactttgagagccatcaccagcgacttcggtcgtatgggtaaag

SEQ ID NO: 2149 - RNA, 105 nt, synthetic construct
  source 1..105: mol_type = other RNA
gatgggcttttatctcattactttgagagccatcaccagcgacttcggtcgtatgggtaaagcgcttatttatcggcttcggccgataaataagaagcatcaaag

SEQ ID NO: 2150 - RNA, 156 nt, synthetic construct
  source 1..156: mol_type = other RNA
tactggcgcttttatctcattactttgagagccatcaccagcgactatgtcgtatgggtaaagcgctacactgggatcgctgaattagagatcggcgtcctttcattctatatactttggagttttaaaatgtctctaagtacagaagcatcaaag

SEQ ID NO: 2151 - RNA, 103 nt, synthetic construct
  source 1..103: mol_type = other RNA
ggcgcttttatctcattactttgagagccatcaccagcgacttcggtcgtatgggtaaagcgcttatttatcggcttcggccgataaataagaagcatcaaag

SEQ ID NO: 2152 - RNA, 106 nt, synthetic construct
  source 1..106: mol_type = other RNA
gctggcgcttttatctcattactttgagagccatcaccagcgacttcggtcgtatgggtaaagcgcttatttatcggcttcggccgataaataagaagcatcaaag

SEQ ID NO: 2153 - RNA, 109 nt, synthetic construct
  source 1..109: mol_type = other RNA
tactggcgcttttatctcattactttgagagccatcaccagcgacttcggtcgtatgggtaaagcgcttatttatcggagagaaatccgataaataagaagcatcaaag

SEQ ID NO: 2154 - RNA, 112 nt, synthetic construct
  source 1..112: mol_type = other RNA
tactggcgcttttatctcattactttgagagccatgctccaccagcgactatgtcgtatgggtaaagcgcttatttatcggagagaaatccgataaataagaagcatcaaag

SEQ ID NO: 2155 - RNA, 97 nt, synthetic construct
  source 1..97: mol_type = other RNA
tactggcgcttttatctcattactttgagagccatcaccagcgactatgtcgtatgggtaaagcggggttagggttagggttagggaagcatcaaag

SEQ ID NO: 2156 - RNA, 96 nt, synthetic construct
  source 1..96: mol_type = other RNA
tactggcgcttttatctcattactttgagagccatcaccagcgactatgtcgtatgggtaaagcggagggagggagggagagggaaagcatcaaag

SEQ ID NO: 2157 - RNA, 101 nt, synthetic construct
  source 1..101: mol_type = other RNA
tactggcgcttttatctcattactttgagagccatcaccagcgactatgtcgtatgggtaaagcgttgggttagggttagggttagggaaaagcatcaaag

SEQ ID NO: 2158 - RNA, 91 nt, synthetic construct
  source 1..91: mol_type = other RNA
tactggcgcttttatctcattactttgagagccatcaccagcgactatgtcgtatgggtaaagcgcagggcttcggccggaagcatcaaag

SEQ ID NO: 2159 - RNA, 103 nt, synthetic construct
  source 1..103: mol_type = other RNA
tactggcgcttttatctcattactttgagagccatcaccagcgactatgtcgtatgggtaaagcgcctgctcagtacgagaggaaccgcaggaagcatcaaag

SEQ ID NO: 2160 - RNA, 90 nt, synthetic construct
  source 1..90: mol_type = other RNA
tactggcgcttttatctgattactttgagagccatcaccagcgactatgtcgtatgggtaaagcgccctcttcggagggaagcatcaaag

SEQ ID NO: 2161 - RNA, 98 nt, synthetic construct
  source 1..98: mol_type = other RNA
tactggcgcctttatctgattactttgagagccatcaccagcgactatgtcgtatgggtaaagcgcttacggacttcggtccgtaagaagcatcaaag

SEQ ID NO: 2162 - RNA, 98 nt, synthetic construct
  source 1..98: mol_type = other RNA
tactggcgcttttatctgattactttgagagccatcaccagcgactatgtcgtatgggtaaagcgcggacgacctctcggtcgtccgaagcatcaaag

SEQ ID NO: 2163 - RNA, 108 nt, synthetic construct
  source 1..108: mol_type = other RNA
tactggcgcttttatctgattactttgagagccatcaccagcgactatgtcgtatgggtaaagcgcaggtgggacgacctctcggtcgtcctatctgaagcatcaaag

SEQ ID NO: 2164 - RNA, 99 nt, synthetic construct
  source 1..99: mol_type = other RNA
tactggcgcctttatctgcattactttgagagccatcaccagcgactatgtcgtatgggtaaagcgcttacggacttcggtccgtaagaagcatcaaag

SEQ ID NO: 2165 - RNA, 97 nt, synthetic construct
  source 1..97: mol_type = other RNA
gctggcgcttttatctgattactttgagagccatcaccagcgactatgtcgtatgggtaaagcgcttacggacttcggtccgtaagaagcatcaaag

SEQ ID NO: 2166 - RNA, 108 nt, synthetic construct
  source 1..108: mol_type = other RNA
tactggcgcctttatctgattactttgagagccatcaccagcgactatgtcgtatgggtaaagcgcaggtgggacgacctctcggtcgtcctatctgaagcatcaaag

SEQ ID NO: 2167 - RNA, 98 nt, synthetic construct
  source 1..98: mol_type = other RNA
tactggcgcctttatctgattactttgagagccatcaccagcgactatgtcgtatgggtaaagcgcggacgacctctcggtcgtccgaagcatcaaag

SEQ ID NO: 2168 - RNA, 90 nt, synthetic construct
  source 1..90: mol_type = other RNA
tactggcgcctttatctcattactttgagagccatcaccagcgactatgtcgtatgggtaaagcgccctcttcggagggaagcatcaaag

SEQ ID NO: 2169 - RNA, 98 nt, synthetic construct
  source 1..98: mol_type = other RNA
tactggcgcttttatctcattactttgagagccatcaccagcgactatgtcgtatgggtaaagcgcttacggacttcggtccgtaagaagcatcaaag

SEQ ID NO: 2170 - RNA, 99 nt, synthetic construct
  source 1..99: mol_type = other RNA
tactggcgcctttatcatcattactttgagagccatcaccagcgactatgtcgtatgggtaaagcgcttacggacttcggtccgtaagaagcatcaaag

SEQ ID NO: 2171 - RNA, 194 nt, synthetic construct
  source 1..194: mol_type = other RNA
tactggcgcttttatctcattactttgagagccatcaccagcgactatgtcgtatgggtaaagcgcttatttatcggagagaaatccgataaataagaagcatcaaagggccggcatggtcccagcctcctcgctggcgccggctgggcaacattccgaggggaccgtcccctcggtaatggcgaatgggaccc

SEQ ID NO: 2172 - RNA, 108 nt, synthetic construct
  source 1..108: mol_type = other RNA
tactggcgcctttatctcattactttgagagccatcaccagcgactatgtcgtatgggtaaagcgcaggtgggacgacctctcggtcgtcctatctgaagcatcaaag

SEQ ID NO: 2173 - RNA, 106 nt, synthetic construct
  source 1..106: mol_type = other RNA
tactggcgcttttatctcattactttgagagccatcaccagcgactatgtcgtatgggtaaagcgcttatttatcggagaaatccgataaataagaagcatcaaag

SEQ ID NO: 2174 - RNA, 98 nt, synthetic construct
  source 1..98: mol_type = other RNA
tactggcgcctttatctcattactttgagagccatcaccagcgactatgtcgtatgggtaaagcgcggacgacctctcggtcgtccgaagcatcaaag

SEQ ID NO: 2175 - RNA, 92 nt, synthetic construct
  source 1..92: mol_type = other RNA
tactggcgcttttatctcattactttgagagccatcaccagcgactatgtcgtatgggtaaagcgccggacttcggtccggaagcatcaaag

SEQ ID NO: 2176 - RNA, 108 nt, synthetic construct
  source 1..108: mol_type = other RNA
tactggcgcttttatcggattactttgagagccatcaccagcgactatgtcgtatgggtaaagcgcttatttatcggagagaaatccgataaataagaagcatcaaag

SEQ ID NO: 2177 - RNA, 98 nt, synthetic construct
  source 1..98: mol_type = other RNA
tactggcgcttttatctcattactttgagagccatcaccagcgactatgtcgtatgggtaaagcgcggacgacctctcggtcgtccgaagcatcaaag

SEQ ID NO: 2178 - RNA, 89 nt, synthetic construct
  source 1..89: mol_type = other RNA
gctggcgcttttatctgattactttgagagccatcaccagcgactatgtcgtatgggtaaagcgccctcttcggagggaagcatcaaag

SEQ ID NO: 2179 - RNA, 88 nt, synthetic construct
  source 1..88: mol_type = other RNA
gctggcgcctttatctgattactttgagagccatcaccagcgactatgtcgtatgggtaaagctccctcttcggagggagcatcaaag

SEQ ID NO: 2180 - RNA, 197 nt, synthetic construct
  source 1..197: mol_type = other RNA
tactggcgcttttatctcattactttgagagccatcaccagcgactatgtcgtatgggtaaagcgcttatttatcggagagaaatccgataaataagaagcatcaaaggggtcggcatggcatctccacctcctcgcggtccgacctgggcatccgaaggaggacgcacgtccactcggatggctaagggagagcca

SEQ ID NO: 2181 - RNA, 88 nt, synthetic construct
  source 1..88: mol_type = other RNA
gctggcgcctttatctgattactttgagagccatcaccagcgactatgtcgtatgggtaaagcgccctcttcggagggcgcatcaaag

SEQ ID NO: 2182 - RNA, 186 nt, synthetic construct
  source 1..186: mol_type = other RNA
tactggcgcttttatctcattactttgagagccatcaccagcgactatgtcgtatgggtaaagcgcttatttatcggagagaaatccgataaataagaagcatcaaagttttggccggcatggtcccagcctcctcgctggcgccggctgggcaacatgcttcggcatggcgaatgggaccccggg

SEQ ID NO: 2183 - RNA, 97 nt, synthetic construct
  source 1..97: mol_type = other RNA
gatggcgcctttatctcattactttgagagccatcaccagcgactatgtcgtatgggtaaagcgcttacggacttcggtccgtaagaagcatcaaag

SEQ ID NO: 2184 - RNA, 89 nt, synthetic construct
  source 1..89: mol_type = other RNA
gctggcgcttttatctcattactttgagagccatcaccagcgactatgtcgtatgggtaaagcgccctcttcggagggaagcatcaaag

SEQ ID NO: 2185 - RNA, 96 nt, synthetic construct
  source 1..96: mol_type = other RNA
gctggcgcctttatctgattactttgagagccatcaccagcgactatgtcgtatgggtaaagctcttacggacttcggtccgtaagagcatcaaag

SEQ ID NO: 2186 - RNA, 96 nt, synthetic construct
  source 1..96: mol_type = other RNA
gctggcgcctttatctgattactttgagagccatcaccagcgactatgtcgtatgggtaaagctcggacgacctctcggtcgtccgagcatcaaag

SEQ ID NO: 2187 - RNA, 160 nt, synthetic construct
  source 1..160: mol_type = other RNA
tactggcgcttttatctcattactttgagagccatcaccagcgactatgtcgtatgggtaaagcgcttatttatcggagagaaatccgataaataagaagcatcaaagcctgtcaccggatgtgctttccggtctgatgagtccgtgaggacgaaacagg

SEQ ID NO: 2188 - RNA, 97 nt, synthetic construct
  source 1..97: mol_type = other RNA
gctggcgcttttatctgattactttgagagccatcaccagcgactatgtcgtatgggtaaagcgcggacgacctctcggtcgtccgaagcatcaaag

SEQ ID NO: 2189 - RNA, 97 nt, synthetic construct
  source 1..97: mol_type = other RNA
gctggcgcctttatctgattactttgagagccatcaccagcgactatgtcgtatgggtaaagcgcggacgacctctcggtcgtccgaagcatcaaag

SEQ ID NO: 2190 - RNA, 106 nt, synthetic construct
  source 1..106: mol_type = other RNA
gctggcgcctttatctgattactttgagagccatcaccagcgactatgtcgtatgggtaaagctcaggtgggacgacctctcggtcgtcctatctgagcatcaaag

SEQ ID NO: 2191 - RNA, 177 nt, synthetic construct
  source 1..177: mol_type = other RNA
tactggcgcttttatctcattactttgagagccatcaccagcgactatgtcgtatgggtaaagcgcttatttatcggagagaaatccgataaataagaagcatcaaaggatggccggcatggtcccagcctcctcgctggcgccggctgggcaacaccttcgggtggcgaatgggac

SEQ ID NO: 2192 - RNA, 107 nt, synthetic construct
  source 1..107: mol_type = other RNA
gctggcgcttttatctgattactttgagagccatcaccagcgactatgtcgtatgggtaaagcgcaggtgggacgacctctcggtcgtcctatctgaagcatcaaag

SEQ ID NO: 2193 - RNA, 109 nt, synthetic construct
  source 1..109: mol_type = other RNA
tactggcgcttttatctcattactttgagagccatcaccagcgactatgtcgtactgggtaaagcgcttatttatcggagagaaatccgataaataagaagcatcaaag

SEQ ID NO: 2194 - RNA, 107 nt, synthetic construct
  source 1..107: mol_type = other RNA
tactggcgcttttatctcattactttgagagccatcaccagcgactatgtcgtatgggtaaagcgcttatttatcgtgagaaatccgataaataagaagcatcaaag

SEQ ID NO: 2195 - RNA, 109 nt, synthetic construct
  source 1..109: mol_type = other RNA
gtactggcgcttttatctcattactttgagagccatcaccagcgactatgtcgtatgggtaaagcgcttatttatcggagagaaatccgataaataagaagcatcaaag

SEQ ID NO: 2196 - RNA, 97 nt, synthetic construct
  source 1..97: mol_type = other RNA
gctggcgcttttatctcattactttgagagccatcaccagcgactatgtcgtatgggtaaagcgcggacgacctctcggtcgtccgaagcatcaaag

SEQ ID NO: 2197 - RNA, 97 nt, synthetic construct
  source 1..97: mol_type = other RNA
gctggcgcctttatctgattactttgagagccatcaccagcgactatgtcgtatgggtaaagcgcttacggacttcggtccgtaagaagcatcaaag

SEQ ID NO: 2198 - RNA, 107 nt, synthetic construct
  source 1..107: mol_type = other RNA
gctggcgcttttatctcattactttgagagccatcaccagcgactatgtcgtatgggtaaagcgcttatttatcggagagaaatccgataaataagaagcatcaaag

SEQ ID NO: 2199 - RNA, 97 nt, synthetic construct
  source 1..97: mol_type = other RNA
gctggcgcctttatctcattactttgagagccatcaccagcgactatgtcgtatgggtaaagcgcttacggacttcggtccgtaagaagcatcaaag

SEQ ID NO: 2200 - RNA, 89 nt, synthetic construct
  source 1..89: mol_type = other RNA
gctggcgcctttatctgattactttgagagccatcaccagcgactatgtcgtatgggtaaagcgccctcttcggagggaagcatcaaag

SEQ ID NO: 2201 - RNA, 107 nt, synthetic construct
  source 1..107: mol_type = other RNA
gctggcgcttttatctcattactttgagagccatcaccagcgactatgtcgtatgggtaaagcgcaggtgggacgacctctcggtcgtcctatctgaagcatcaaag

SEQ ID NO: 2202 - RNA, 107 nt, synthetic construct
  source 1..107: mol_type = other RNA
gctggcgcctttatctcattactttgagagccatcaccagcgactatgtcgtatgggtaaagcgcaggtgggacgacctctcggtcgtcctatctgaagcatcaaag

SEQ ID NO: 2203 - RNA, 107 nt, synthetic construct
  source 1..107: mol_type = other RNA
gctggcgcctttatctgattactttgagagccatcaccagcgactatgtcgtatgggtaaagcgcaggtgggacgacctctcggtcgtcctatctgaagcatcaaag

SEQ ID NO: 2204 - RNA, 98 nt, synthetic construct
  source 1..98: mol_type = other RNA
tactggcgcttttatctgattactttgagagccatcaccagcgactatgtcgtatgggtaaagcgcttacggacttcggtccgtaagaagcatcaaag

SEQ ID NO: 2205 - RNA, 89 nt, synthetic construct
  source 1..89: mol_type = other RNA
gctggcgcctttatctcattactttgagagccatcaccagcgactatgtcgtatgggtaaagcgccctcttcggagggaagcatcaaag

SEQ ID NO: 2206 - RNA, 97 nt, synthetic construct
  source 1..97: mol_type = other RNA
gctggcgcttttatctcattactttgagagccatcaccagcgactatgtcgtatgggtaaagcgcttacggacttcggtccgtaagaagcatcaaag

SEQ ID NO: 2207 - RNA, 97 nt, synthetic construct
  source 1..97: mol_type = other RNA
gctggcgcctttatctcattactttgagagccatcaccagcgactatgtcgtatgggtaaagcgcggacgacctctcggtcgtccgaagcatcaaag

SEQ ID NO: 2208 - RNA, 177 nt, synthetic construct
  source 1..177: mol_type = other RNA
gatggccggcatggtcccagcctcctcgctggcgccggctgggcaacaccttcgggtggcgaatgggactactggcgcttttatctcattactttgagagccatcaccagcgactatgtcgtatgggtaaagcgcttatttatcggagagaaatccgataaataagaagcatcaaag

SEQ ID NO: 2209 - RNA, 194 nt, synthetic construct
  source 1..194: mol_type = other RNA
ggccggcatggtcccagcctcctcgctggcgccggctgggcaacattccgaggggaccgtcccctcggtaatggcgaatgggaccctactggcgcttttatctcattactttgagagccatcaccagcgactatgtcgtatgggtaaagcgcttatttatcggagagaaatccgataaataagaagcatcaaag

SEQ ID NO: 2210 - RNA, 96 nt, synthetic construct
  source 1..96: mol_type = other RNA
gctggcgcctttatctgattactttgagagccatcaccagcgactatgtcgtatgggtaaagcgcttacggacttcggtccgtaagcgcatcaaag

SEQ ID NO: 2211 - RNA, 172 nt, synthetic construct
  source 1..172: mol_type = other RNA
cgtggttagggccacgttaaatagttgcttaagccctaagcgttgatcttcggatcaggtgcaatactggcgcttttatctcattactttgagagccatcaccagcgactatgtcgtatgggtaaagcgcttatttatcggagagaaatccgataaataagaagcatcaaag

SEQ ID NO: 2212 - RNA, 197 nt, synthetic construct
  source 1..197: mol_type = other RNA
gggtcggcatggcatctccacctcctcgcggtccgacctgggcatccgaaggaggacgcacgtccactcggatggctaagggagagccatactggcgcttttatctcattactttgagagccatcaccagcgactatgtcgtatgggtaaagcgcttatttatcggagagaaatccgataaataagaagcatcaaag

SEQ ID NO: 2213 - RNA, 171 nt, synthetic construct
  source 1..171: mol_type = other RNA
tactggcgcttttatctcattactttgagagccatcaccagcgactatgtcgtatgggtaaagcgcttatttatcggagagaaatccgataaataagaagcatcaaagccagtactgatgagtccgtgaggacgaaacgagtaagctcgtctactggcgcttttatctcat

SEQ ID NO: 2214 - RNA, 99 nt, synthetic construct
  source 1..99: mol_type = other RNA
tactggcgcctttatctcattactttagagagccatcaccagcgactatgtcgtatgggtaaagcgcttacggacttcggtccgtaagaagcatcaaag

SEQ ID NO: 2215 - RNA, 157 nt, synthetic construct
  source 1..157: mol_type = other RNA
cgactactgatgagtccgtgaggacgaaacgagtaagctcgtctagtcgtactggcgcttttatctcattactttgagagccatcaccagcgactatgtcgtatgggtaaagcgcttatttatcggagagaaatccgataaataagaagcatcaaag

SEQ ID NO: 2216 - RNA, 106 nt, synthetic construct
  source 1..106: mol_type = other RNA
gctggcgcctttatctgattactttgagagccatcaccagcgactatgtcgtatgggtaaagcgcaggtgggacgacctctcggtcgtcctatctgcgcatcaaag

SEQ ID NO: 2217 - RNA, 97 nt, synthetic construct
  source 1..97: mol_type = other RNA
tactggcgcctttatctcattactttagagccatcaccagcgactatgtcgtatgggtaaagcgcttacggacttcggtccgtaagaagcatcaaag

SEQ ID NO: 2218 - RNA, 186 nt, synthetic construct
  source 1..186: mol_type = other RNA
tactggcgcttttatctcattactttgagagccatcaccagcgactatgtcgtatgggtaaagcgcttatttatcggagagaaatccgataaataagaagcatcaaagcattcctcagaaaatgacaaacctgtggggcgtaagtagatcttcggatctatgatcgtgcagacgttaaaatcaggt

SEQ ID NO: 2219 - RNA, 171 nt, synthetic construct
  source 1..171: mol_type = other RNA
tactggcgcttttatctcattactttgagagccatcaccagcgactatgtcgtatgggtaaagcgcttatttatcggagagaaatccgataaataagaagcatcaaagcgactactgatgagtccgtgaggacgaaacgagtaagctcgtctagtcgcgtgtagcgaagca

SEQ ID NO: 2220 - RNA, 186 nt, synthetic construct
  source 1..186: mol_type = other RNA
cattcctcagaaaatgacaaacctgtggggcgtaagtagatcttcggatctatgatcgtgcagacgttaaaatcaggttactggcgcttttatctcattactttgagagccatcaccagcgactatgtcgtatgggtaaagcgcttatttatcggagagaaatccgataaataagaagcatcaaag

SEQ ID NO: 2221 - RNA, 186 nt, synthetic construct
  source 1..186: mol_type = other RNA
ttttggccggcatggtcccagcctcctcgctggcgccggctgggcaacatgcttcggcatggcgaatgggaccccgggtactggcgcttttatctcattactttgagagccatcaccagcgactatgtcgtatgggtaaagcgcttatttatcggagagaaatccgataaataagaagcatcaaag

SEQ ID NO: 2222 - RNA, 171 nt, synthetic construct
  source 1..171: mol_type = other RNA
cgactactgatgagtccgtgaggacgaaacgagtaagctcgtctagtcgcgtgtagcgaagcatactggcgcttttatctcattactttgagagccatcaccagcgactatgtcgtatgggtaaagcgcttatttatcggagagaaatccgataaataagaagcatcaaag

SEQ ID NO: 2223 - RNA, 168 nt, synthetic construct
  source 1..168: mol_type = other RNA
tactggcgcttttatctcattactttgagagccatcaccagcgactatgtcgtatgggtaaagcgcttatttatcggagagaaatccgataaataagaagcatcaaaggggagccccgctgatgaggtcggggagaccgaaagggacttcggtccctacggggctccc

SEQ ID NO: 2224 - RNA, 144 nt, synthetic construct
  source 1..144: mol_type = other RNA
ccacccccaccaccacccccacccccaccaccaccctactggcgcttttatctcattactttgagagccatcaccagcgactatgtcgtatgggtaaagcgcttatttatcggagagaaatccgataaataagaagcatcaaag

SEQ ID NO: 2225 - RNA, 157 nt, synthetic construct
  source 1..157: mol_type = other RNA
tactggcgcttttatctcattactttgagagccatcaccagcgactatgtcgtatgggtaaagcgcttatttatcggagagaaatccgataaataagaagcatcaaagcgactactgatgagtccgtgaggacgaaacgagtaagctcgtctagtcg

SEQ ID NO: 2226 - RNA, 172 nt, synthetic construct
  source 1..172: mol_type = other RNA
tactggcgcttttatctcattactttgagagccatcaccagcgactatgtcgtatgggtaaagcgcttatttatcggagagaaatccgataaataagaagcatcaaagcgtggttagggccacgttaaatagttgcttaagccctaagcgttgatcttcggatcaggtgcaa

SEQ ID NO: 2227 - RNA, 184 nt, synthetic construct
  source 1..184: mol_type = other RNA
tactggcgcttttatctcattactttgagagccatcaccagcgactatgtcgtatgggtaaagcgcttatttatcggagagaaatccgataaataagaagcatcaaagggcaataaagcggttacaagcccgcaaaaatagcagagtaatgtcgcgatagcgcggcattaatgcagctttattg

SEQ ID NO: 2228 - RNA, 122 nt, synthetic construct
  source 1..122: mol_type = other RNA
tactggcgcttttatctcattactattatctcattactttgagagccatcaccagcgactatgtcgtatgggtaaagcgcttatttatcggagagaaatccgataaataagaagcatcaaag

SEQ ID NO: 2229 - RNA, 184 nt, synthetic construct
  source 1..184: mol_type = other RNA
ggcaataaagcggttacaagcccgcaaaaatagcagagtaatgtcgcgatagcgcggcattaatgcagctttattgtactggcgcttttatctcattactttgagagccatcaccagcgactatgtcgtatgggtaaagcgcttatttatcggagagaaatccgataaataagaagcatcaaag

SEQ ID NO: 2230 - RNA, 185 nt, synthetic construct
  source 1..185: mol_type = other RNA
tactggcgcttttatctcattactttgagagccatcaccagcgactatgtcgtatgggtaaagcgcttatttatcggagagaaatccgataaataagaagcatcaaagacccgcaaggccgacggcatccgccgccgctggtgcaagtccagccgccccttcgggggcgggcgctcatgggtaac

SEQ ID NO: 2231 - RNA, 63 nt, synthetic construct
  source 1..63: mol_type = other RNA
tactggcgcttttatctcattactttgagagccatcaccagcgactatgtcgtatgggtaaag

SEQ ID NO: 2232 - RNA, 168 nt, synthetic construct
  source 1..168: mol_type = other RNA
gggagccccgctgatgaggtcggggagaccgaaagggacttcggtccctacggggctccctactggcgcttttatctcattactttgagagccatcaccagcgactatgtcgtatgggtaaagcgcttatttatcggagagaaatccgataaataagaagcatcaaag

SEQ ID NO: 2233 - RNA, 171 nt, synthetic construct
  source 1..171: mol_type = other RNA
ccagtactgatgagtccgtgaggacgaaacgagtaagctcgtctactggcgcttttatctcattactggcgcttttatctcattactttgagagccatcaccagcgactatgtcgtatgggtaaagcgcttatttatcggagagaaatccgataaataagaagcatcaaag

SEQ ID NO: 2234 - RNA, 185 nt, synthetic construct
  source 1..185: mol_type = other RNA
acccgcaaggccgacggcatccgccgccgctggtgcaagtccagccgccccttcgggggcgggcgctcatgggtaactactggcgcttttatctcattactttgagagccatcaccagcgactatgtcgtatgggtaaagcgcttatttatcggagagaaatccgataaataagaagcatcaaag

SEQ ID NO: 2235 - RNA, 160 nt, synthetic construct
  source 1..160: mol_type = other RNA
cctgtcaccggatgtgctttccggtctgatgagtccgtgaggacgaaacaggtactggcgcttttatctcattactttgagagccatcaccagcgactatgtcgtatgggtaaagcgcttatttatcggagagaaatccgataaataagaagcatcaaag

SEQ ID NO: 2236 - RNA, 100 nt, synthetic construct
  source 1..100: mol_type = other RNA
gtactggcgcctttatctcattactttgagagccatcaccagcgactatgtcgtagtgggtaaagcgcttacggacttcggtccgtaagaagcatcaaag

SEQ ID NO: 2237 - RNA, 91 nt, synthetic construct
  source 1..91: mol_type = other RNA
gtactggcgcttttatctgattactttgagagccatcaccagcgactatgtcgtagtgggtaaagctccctcttcggagggagcatcaaag

SEQ ID NO: 2238 - RNA, 89 nt, synthetic construct
  source 1..89: mol_type = other RNA
actggcgcttttatctgattactttgagagccatcaccagcgactatgtcgtagtgggtaaagctccctcttcggagggagcatcaaag

SEQ ID NO: 2239 - RNA, 97 nt, synthetic construct
  source 1..97: mol_type = other RNA
actggcgcctttatctcattactttgagagccatcaccagcgactatgtcgtatgggtaaagcgcttacggacttcggtccgtaagaagcatcaaag

SEQ ID NO: 2240 - RNA, 89 nt, synthetic construct
  source 1..89: mol_type = other RNA
gctggcgcttttatctgattactttgagagccatcaccagcgactatgtcgtagtgggtaaagctccctcttcggagggagcatcaaag

SEQ ID NO: 2241 - RNA, 88 nt, synthetic construct
  source 1..88: mol_type = other RNA
actggcgcttttatctgattactttgagagccatcaccagcgactatgtcgtatgggtaaagctccctcttcggagggagcatcaaag

SEQ ID NO: 2242 - RNA, 151 nt, synthetic construct
  source 1..151: mol_type = other RNA
actggcgcttttatctgattactttgagagccatcaccagcgactatgtcgtagtgggtaaataggagctgcactatgggcgcagtgtcattgacgctgacggtacaggccagacaattattgtctggtatagtgcagctcctaatcaaag

SEQ ID NO: 2243 - RNA, 97 nt, synthetic construct
  source 1..97: mol_type = other RNA
actggcgcctttatctgattactttgagagccatcaccagcgactatgtcgtatgggtaaagcgcttacggacttcggtccgtaagaagcatcaaag

SEQ ID NO: 2244 - RNA, 97 nt, synthetic construct
  source 1..97: mol_type = other RNA
actggcgcttttatctgattactttgagagccatcaccagcgactatgtcgtatgggtaaagcgcttacggacttcggtccgtaagaagcatcaaag

SEQ ID NO: 2245 - RNA, 98 nt, synthetic construct
  source 1..98: mol_type = other RNA
actggcgcttttatctgattactttgagagccatcaccagcgactatgtcgtagtgggtaaagcgcttacggacttcggtccgtaagaagcatcaaag

SEQ ID NO: 2246 - RNA, 89 nt, synthetic construct
  source 1..89: mol_type = other RNA
actggcgcttttatctgattactttgagagccatcaccagcgactatgtcgtattgggtaaagctccctcttcggagggagcatcaaag

SEQ ID NO: 2247 - RNA, 98 nt, synthetic construct
  source 1..98: mol_type = other RNA
actggcgcttttatctgattactttgagagccatcaccagcgactatgtcgtattgggtaaagcgcttacggacttcggtccgtaagaagcatcaaag

SEQ ID NO: 2248 - RNA, 98 nt, synthetic construct
  source 1..98: mol_type = other RNA
actggcgcctttatcatcattactttgagagccatcaccagcgactatgtcgtatgggtaaagcgcttacggacttcggtccgtaagaagcatcaaag

SEQ ID NO: 2249 - RNA, 90 nt, synthetic construct
  source 1..90: mol_type = other RNA
actggcgcttttatctgattactttgagagccatcaccagcgactatgtcgtagtgggtaaagcgccctcttcggagggaagcatcaaag

SEQ ID NO: 2250 - RNA, 96 nt, synthetic construct
  source 1..96: mol_type = other RNA
actggcgcttttatctgattactttgagagccatcaccagcgactatgtcgtagtgggtaaagctcacatgaggatcacccatgtgagcatcaaag

SEQ ID NO: 2251 - RNA, 89 nt, synthetic construct
  source 1..89: mol_type = other RNA
actggcacttttacctgattactttgagagccaacaccagcgactatgtcgtagtgggtaaagctccctcttcggagggagcatcaaag

SEQ ID NO: 2252 - RNA, 89 nt, synthetic construct
  source 1..89: mol_type = other RNA
actggcacttttatctgattactttgagagccatcaccagcgactatgtcgtagtgggtaaagctccctcttcggagggagcatcaaag

SEQ ID NO: 2253 - RNA, 89 nt, synthetic construct
  source 1..89: mol_type = other RNA
actggcccttttatctgattactttgagagccatcaccagcgactatgtcgtagtgggtaaagctccctcttcggagggagcatcaaag

SEQ ID NO: 2254 - RNA, 89 nt, synthetic construct
  source 1..89: mol_type = other RNA
actggcgcttttacctgattactttgagagccatcaccagcgactatgtcgtagtgggtaaagctccctcttcggagggagcatcaaag

SEQ ID NO: 2255 - RNA, 89 nt, synthetic construct
  source 1..89: mol_type = other RNA
actggcgcttttatctgattactttgagagccaacaccagcgactatgtcgtagtgggtaaagctccctcttcggagggagcatcaaag

SEQ ID NO: 2256 - RNA, 97 nt, synthetic construct
  source 1..97: mol_type = other RNA
actggcacctttacctgattactttgagagccaacaccagcgactatgtcgtatgggtaaagcgcttacggacttcggtccgtaagaagcatcaaag

SEQ ID NO: 2257 - RNA, 97 nt, synthetic construct
  source 1..97: mol_type = other RNA
actggcacctttatctgattactttgagagccatcaccagcgactatgtcgtatgggtaaagcgcttacggacttcggtccgtaagaagcatcaaag

SEQ ID NO: 2258 - RNA, 97 nt, synthetic construct
  source 1..97: mol_type = other RNA
actggcccctttatctgattactttgagagccatcaccagcgactatgtcgtatgggtaaagcgcttacggacttcggtccgtaagaagcatcaaag

SEQ ID NO: 2259 - RNA, 97 nt, synthetic construct
  source 1..97: mol_type = other RNA
actggcgcctttatctgattactttgagagccaacaccagcgactatgtcgtatgggtaaagcgcttacggacttcggtccgtaagaagcatcaaag

SEQ ID NO: 2260 - RNA, 89 nt, synthetic construct; identical to SEQ ID NO: 2240
  source 1..89: mol_type = other RNA

SEQ ID NO: 2261 - RNA, 90 nt, synthetic construct
  source 1..90: mol_type = other RNA
gactggcgcttttatctgattactttgagagccatcaccagcgactatgtcgtagtgggtaaagctccctcttcggagggagcatcaaag

SEQ ID NO: 2262 - RNA, 90 nt, synthetic construct
  source 1..90: mol_type = other RNA
actggcgcctttatctgattactttggagagccatcaccagcgactatgtcgtagtgggtaaagctccctcttcggagggagcatcaaag

SEQ ID NO: 2263 - RNA, 89 nt, synthetic construct
  source 1..89: mol_type = other RNA
actggcgcatttatctgattactttgtgagccatcaccagcgactatgtcgtagtgggtaaagctccctcttcggagggagcatcaaag

SEQ ID NO: 2264 - RNA, 89 nt, synthetic construct
  source 1..89: mol_type = other RNA
actggcgcctttatctgattactttgagagccatcaccagcgactatgtcgtagtgggtaaagctccctcttcggagggagcatcaaag

SEQ ID NO: 2265 - RNA, 90 nt, synthetic construct
  source 1..90: mol_type = other RNA
actggcgcttttatctgattactttggagagccatcaccagcgactatgtcgtagtgggtaaagctccctcttcggagggagcatcaaag

SEQ ID NO: 2266 - RNA, 89 nt, synthetic construct
  source 1..89: mol_type = other RNA
actggcgcatttatctgattactttgagagccatcaccagcgactatgtcgtagtgggtaaagctccctcttcggagggagcatcaaag

SEQ ID NO: 2267 - RNA, 89 nt, synthetic construct
  source 1..89: mol_type = other RNA
actggcgcttttatctgattactttgtgagccatcaccagcgactatgtcgtagtgggtaaagctccctcttcggagggagcatcaaag

SEQ ID NO: 2268 - RNA, 90 nt, synthetic construct
  source 1..90: mol_type = other RNA
actggcgcttttattctgattactttgagagccatcaccagcgactatgtcgtagtgggtaaagctccctcttcggagggagcatcaaag

SEQ ID NO: 2269 - RNA, 88 nt, synthetic construct
  source 1..88: mol_type = other RNA
acggcgcttttatctgattactttgagagccatcaccagcgactatgtcgtagtgggtaaagctccctcttcggagggagcatcaaag

SEQ ID NO: 2270 - RNA, 89 nt, synthetic construct
  source 1..89: mol_type = other RNA
actggcgcttttatatgattactttgagagccatcaccagcgactatgtcgtagtgggtaaagctccctcttcggagggagcatcaaag

SEQ ID NO: 2271 - RNA, 90 nt, synthetic construct
  source 1..90: mol_type = other RNA
actggcgcttttatcttgattactttgagagccatcaccagcgactatgtcgtagtgggtaaagctccctcttcggagggagcatcaaag

SEQ ID NO: 2272 - RNA, 89 nt, synthetic construct
  source 1..89: mol_type = other RNA
actggcgcttttatctgattactttgagagccagcaccagcgactatgtcgtagtgggtaaagctccctcttcggagggagcatcaaag

SEQ ID NO: 2273 - RNA, 89 nt, synthetic construct
  source 1..89: mol_type = other RNA
actggcgctgttatctgattacttcgagagccatcaccagcgactatgtcgtagtgggtaaagctccctcttcggagggagcatcgaag

SEQ ID NO: 2274 - RNA, 89 nt, synthetic construct
  source 1..89: mol_type = other RNA
actggcgctcttatctgattacttcgagagccatcaccagcgactatgtcgtagtgggtaaagctccctcttcggagggagcatcgaag

SEQ ID NO: 2275 - RNA, 89 nt, synthetic construct
  source 1..89: mol_type = other RNA
actggcgcttgtatctgattactctgagagccatcaccagcgactatgtcgtagtgggtaaagctccctcttcggagggagcatcagag

SEQ ID NO: 2276 - RNA, 89 nt, synthetic construct
  source 1..89: mol_type = other RNA
actggcgcttctatctgattactctgagagccatcaccagcgactatgtcgtagtgggtaaagctccctcttcggagggagcatcagag

SEQ ID NO: 2277 - RNA, 89 nt, synthetic construct
  source 1..89: mol_type = other RNA
actggcgctttgatctgattaccttgagagccatcaccagcgactatgtcgtagtgggtaaagctccctcttcggagggagcatcaagg

SEQ ID NO: 2278 - RNA, 89 nt, synthetic construct
  source 1..89: mol_type = other RNA
actggcgctttcatctgattaccttgagagccatcaccagcgactatgtcgtagtgggtaaagctccctcttcggagggagcatcaagg

SEQ ID NO: 2279 - RNA, 89 nt, synthetic construct
  source 1..89: mol_type = other RNA
actggcgctgttatctgattactttgagagccatcaccagcgactatgtcgtagtgggtaaagctccctcttcggagggagcatcaaag

SEQ ID NO: 2280 - RNA, 89 nt, synthetic construct
  source 1..89: mol_type = other RNA
actggcgcttttatctgattactttgagagccatcaccagcgactatgtcgtagtgggtaaagctccctcttcggagggagcatcgaag

SEQ ID NO: 2281 - RNA, 89 nt, synthetic construct
  source 1..89: mol_type = other RNA
actggcgcttttatctgattacttcgagagccatcaccagcgactatgtcgtagtgggtaaagctccctcttcggagggagcatcaaag

SEQ ID NO: 2282 - RNA, 98 nt, synthetic construct
  source 1..98: mol_type = other RNA
actggcacttctatctgattactctgagagccatcaccagcgactatgtcgtatgggtaaagccgcttacggacttcggtccgtaagaggcatcagag

SEQ ID NO: 2283 - RNA, 89 nt, synthetic construct
  source 1..89: mol_type = other RNA
actggcacttctatctgattactctgagagccatcaccagcgactatgtcgtagtgggtaaagctccctcttcggagggagcatcagag

SEQ ID NO: 2284 - RNA, 98 nt, synthetic construct
  source 1..98: mol_type = other RNA
actggcacctttatctgattactttgagagccatcaccagcgactatgtcgtatgggtaaagccgcttacggacttcggtccgtaagaggcatcaaag

SEQ ID NO: 2285 - RNA, 98 nt, synthetic construct
  source 1..98: mol_type = other RNA
actggcacttgtatctgattactctgagagccatcaccagcgactatgtcgtatgggtaaagccgcttacggacttcggtccgtaagaggcatcagag

SEQ ID NO: 2286 - RNA, 89 nt, synthetic construct
  source 1..89: mol_type = other RNA
actggcacttgtatctgattactctgagagccatcaccagcgactatgtcgtagtgggtaaagctccctcttcggagggagcatcagag

SEQ ID NO: 2287 - RNA, 141 nt, synthetic construct
  source 1..141: mol_type = other RNA
actggcgcttttatctgattactttgagagccatcaccagcgactatgtcgtagtgggtaaagctgcactatgggcgcagcgtcaatgacgctgacggtacaggccagacaattattgtctggtatagtgcagcatcaaag

SEQ ID NO: 2288 - RNA, 309 nt, synthetic construct
  source 1..309: mol_type = other RNA
actggcgcttttatctgattactttgagagccatcaccagcgactatgtcgtagtgggtaaagctaggagctttgttccttgggttcttgggagcagcaggaagcactatgggcgcagcgtcaatgacgctgacggtacaggccagacaattattgtctggtatagtgcagcagcagaacaatttgctgagggctattgaggcgcaacagcatctgttgcaactcacagtctggggcatcaagcagctccaggcaagaatcctggctgtggaaagatacctaaaggatcaacagctcctagcatcaaag

SEQ ID NO: 2289 - RNA, 100 nt, synthetic construct
  source 1..100: mol_type = other RNA
actggcgcttttatctgattactttgagagccatcaccagcgactatgtcgtagtgggtaaagctccccgtacaccatcagggtacggggagcatcaaag

SEQ ID NO: 2290 - RNA, 97 nt, synthetic construct
  source 1..97: mol_type = other RNA
actggcacttttatctgattactttgagagccatcaccagcgactatgtcgtatgggtaaagcgcttacggacttcggtccgtaagaagcatcaaag

SEQ ID NO: 2291 - RNA, 97 nt, synthetic construct
  source 1..97: mol_type = other RNA
actggcacttctatctgattactctgagagccatcaccagcgactatgtcgtatgggtaaagcgcttacggacttcggtccgtaagaagcatcagag

SEQ ID NO: 2292 - RNA, 98 nt, synthetic construct
  source 1..98: mol_type = other RNA
actggcgcttctatctgattactctgagagccatcaccagcgactatgtcgtatgggtaaagccgcttacggacttcggtccgtaagaggcatcagag

SEQ ID NO: 2293 - RNA, 98 nt, synthetic construct
  source 1..98: mol_type = other RNA
actggcacttctatctgattactctgagcgccatcaccagcgactatgtcgtatgggtaaagccgcttacggacttcggtccgtaagaggcatcagag

SEQ ID NO: 2294 - RNA, 98 nt, synthetic construct
  source 1..98: mol_type = other RNA
actggcgcttctatctgattactctgagcgccatcaccagcgactatgtcgtatgggtaaagccgcttacggacttcggtccgtaagaggcatcagag

SEQ ID NO: 2295 - RNA, 98 nt, synthetic construct
  source 1..98: mol_type = other RNA
actggcgcttctatctgattactctgagcgccatcaccagcgactatgtcgtatgggtaaagcgccttacggacttcggtccgtaaggagcatcagag

SEQ ID NO: 2296 - RNA, 99 nt, synthetic construct
  source 1..99: mol_type = other RNA
actggcgcttctatctgattactctgagcgccatcaccagcgactatgtcgtagtgggtaaagccgcttacggacttcggtccgtaagaggcatcagag

SEQ ID NO: 2297 - RNA, 98 nt, synthetic construct
  source 1..98: mol_type = other RNA
acgggactttctatctgattactctgaagtccctcaccagcgactatgtcgtatgggtaaagccgcttacggacttcggtccgtaagaggcatcagag

SEQ ID NO: 2298 - RNA, 98 nt, synthetic construct
  source 1..98: mol_type = other RNA
acctgtagttctatctgattactctgactacagtcaccagcgactatgtcgtatgggtaaagccgcttacggacttcggtccgtaagaggcatcagag

SEQ ID NO: 2299 - RNA, 113 nt, synthetic construct
  source 1..113: mol_type = other RNA
actggcgcttttatctgattactttgagagccatcaccagcgactatgtcgtagtgggtaaagctgcacggtgggcgcagcttcggctgacggtacaccgtgcagcatcaaag

SEQ ID NO: 2300 - RNA, 143 nt, synthetic construct
  source 1..143: mol_type = other RNA
actggcgcttttatctgattactttgagagccatcaccagcgactatgtcgtagtgggtaaagctgcacggtgggcgcagcttcggctgacggtacaccggtgggcgcagcttcggctgacggtacaccgtgcagcatcaaag

SEQ ID NO: 2301 - RNA, 173 nt, synthetic construct
  source 1..173: mol_type = other RNA
actggcgcttttatctgattactttgagagccatcaccagcgactatgtcgtagtgggtaaagctgcacggtgggcgcagcttcggctgacggtacaccggtgggcgcagcttcggctgacggtacaccggtgggcgcagcttcggctgacggtacaccgtgcagcatcaaag

SEQ ID NO: 2302 - RNA, 203 nt, synthetic construct
  source 1..203: mol_type = other RNA
actggcgcttttatctgattactttgagagccatcaccagcgactatgtcgtagtgggtaaagctgcacggtgggcgcagcttcggctgacggtacaccggtgggcgcagcttcggctgacggtacaccggtgggcgcagcttcggctgacggtacaccggtgggcgcagcttcggctgacggtacaccgtgcagcatcaaag

SEQ ID NO: 2303 - RNA, 233 nt, synthetic construct
  source 1..233: mol_type = other RNA
actggcgcttttatctgattactttgagagccatcaccagcgactatgtcgtagtgggtaaagctgcacggtgggcgcagcttcggctgacggtacaccggtgggcgcagcttcggctgacggtacaccggtgggcgcagcttcggctgacggtacaccggtgggcgcagcttcggctgacggtacaccggtgggcgcagcttcggctgacggtacaccgtgcagcatcaaag

SEQ ID NO: 2304 - RNA, 97 nt, synthetic construct
  source 1..97: mol_type = other RNA
actggcgcttttatctgattactttgagagccatcaccagcgactatgtcgtagtgggtaaagctgcacctagcggaggctaggtgcagcatcaaag

SEQ ID NO: 2305 - RNA, 118 nt, synthetic construct
  source 1..118: mol_type = other RNA
actggcgcttttatctgattactttgagagccatcaccagcgactatgtcgtagtgggtaaagctgcacctcggcttgctgaagcgcgcacggcaagaggcgaggtgcagcatcaaag

SEQ ID NO: 2306 - RNA, 192 nt, synthetic construct
  source 1..192: mol_type = other RNA
actggcgcttttatctgattactttgagagccatcaccagcgactatgtcgtagtgggtaaagctgcacctctctcgacgcaggactcggcttgctgaagcgcgcacggcaagaggcgaggggcggcgactggtgagtacgccaaaaattttgactagcggaggctagaaggagagaggtgcagcatcaaag

SEQ ID NO: 2307 - RNA, 156 nt, synthetic construct
  source 1..156: mol_type = other RNA
actggcgcttttatctgattactttgagagccatcaccagcgactatgtcgtagtgggtaaagctgcacggtgcccgtctgttgtgtcgagagacgccaaaaattttgactagcggaggctagaaggagagagatgggtgccgtgcagcatcaaag

SEQ ID NO: 2308 - RNA, 96 nt, synthetic construct
  source 1..96: mol_type = other RNA
actggcgcttttatctgattactttgagagccatcaccagcgactatgtcgtagtgggtaaagctgcacatggagaggagatgtgcagcatcaaag

SEQ ID NO: 2309 - RNA, 91 nt, synthetic construct
  source 1..91: mol_type = other RNA
actggcgcttttatctgattactttgagagccatcaccagcgactatgtcgtagtgggtaaagctgcacatggagatgtgcagcatcaaag

SEQ ID NO: 2310 - RNA, 106 nt, synthetic construct
  source 1..106: mol_type = other RNA
actggcgcttttatctgattactttgagagccatcaccagcgactatgtcgtagtgggtaaagcttgggcgcagcgtcaatgacgctgacggtacaagcatcaaag

SEQ ID NO: 2311 - RNA, 145 nt, synthetic construct
  source 1..145: mol_type = other RNA
actggcgcttttatctgattactttgagagccatcaccagcgactatgtcgtagtgggtaaagctgcactatgggcgcagcgtcaatgacgctgacggtacaggccacatgaggatcacccatgtggtatagtgcagcatcaaag

SEQ ID NO: 2312 - RNA, 155 nt, synthetic construct
  source 1..155: mol_type = other RNA
actggcgcttttatctgattactttgagagccatcaccagcgactatgtcgtagtgggtaaagctgcactatgggcgcagctcatgaggatcacccatgagctgacggtacaggccacatgaggatcacccatgtggtatagtgcagcatcaaag

SEQ ID NO: 2313 - RNA, 151 nt, synthetic construct
  source 1..151: mol_type = other RNA
actggcgcttttatctgattactttgagagccatcaccagcgactatgtcgtagtgggtaaagctgcactatgggcgcagcgtcaatgacgctgacggtacaggccacatggcagtcgtaacgacgcgggtggtatagtgcagcatcaaag

SEQ ID NO: 2314 - RNA, 172 nt, synthetic construct
  source 1..172: mol_type = other RNA
actggcgcttttatctgattactttgagagccatcaccagcgactatgtcgtagtgggtaaagctgcactatgggcgcagcaaacatggcagtcctaaggacgcgggttttgctgacggtacaggccacatggcagtcgtaacgacgcgggtggtatagtgcagcatcaaag

SEQ ID NO: 2315 - RNA, 159 nt, synthetic construct
  source 1..159: mol_type = other RNA
actggcgcttttatctgattactttgagagccatcaccagcgactatgtcgtagtgggtaaagctgcactatgggcgcagacatggcagtcgtaacgacgcgggtctgacggtacaggccacatgaggatcacccatgtggtatagtgcagcatcaaag

SEQ ID NO: 2316 - RNA, 108 nt, synthetic construct
  source 1..108: mol_type = other RNA
actggcgcttttatctgattactttgagagccatcaccagcgactatgtcgtagtgggtaaagctgcactaaggagtttatatggaaacccttagtgcagcatcaaag

SEQ ID NO: 2317 - RNA, 242 nt, synthetic construct
  source 1..242: mol_type = other RNA
actggcgcttttatctgattactttgagagccatcaccagcgactatgtcgtagtgggtaaagctcaggaagcactatgggcgcagcgtcaatgacgctgacggtacaggccagacaattattgtctggtatagtgcagcagcagaacaatttgctgagggctattgaggcgcaacagcatctgttgcaactcacagtctggggcatcaagcagctccaggcaagaatcctgagcatcaaag

SEQ ID NO: 2318 - RNA, 98 nt, synthetic construct
  source 1..98: mol_type = other RNA
actggcgcttttatctgattactttgagagccatcaccagcgactatgtcgtagtgggtaaagctgcacgccctgaagaagggcgtgcagcatcaaag

SEQ ID NO: 2319 - RNA, 111 nt, synthetic construct
  source 1..111: mol_type = other RNA
actggcgcttttatctgattactttgagagccatcaccagcgactatgtcgtagtgggtaaagctgcacggctcgtgtagctcattagctccgagccgtgcagcatcaaag

SEQ ID NO: 2320 - RNA, 113 nt, synthetic construct
  source 1..113: mol_type = other RNA
actggcgcttttatctgattactttgagagccatcaccagcgactatgtcgtagtgggtaaagctgcacccgtgtgcatccgcagtgtcggatccacgggtgcagcatcaaag

SEQ ID NO: 2321 - RNA, 112 nt, synthetic construct
  source 1..112: mol_type = other RNA
actggcgcttttatctgattactttgagagccatcaccagcgactatgtcgtagtgggtaaagctgcacggaatccattgcactccggatttcactaggtgcagcatcaaag

SEQ ID NO: 2322 - RNA, 103 nt, synthetic construct
  source 1..103: mol_type = other RNA
actggcgcttttatctgattactttgagagccatcaccagcgactatgtcgtagtgggtaaagctgcacatgcatgtctaagacagcatgtgcagcatcaaag

SEQ ID NO: 2323 - RNA, 106 nt, synthetic construct
  source 1..106: mol_type = other RNA
actggcgcttttatctgattactttgagagccatcaccagcgactatgtcgtagtgggtaaagctgcacaaaacataaggaaaacctatgttgtgcagcatcaaag

SEQ ID NO: 2324 - RNA, 153 nt, synthetic construct
  source 1..153: mol_type = other RNA
actggcgcttctatctgattactctgagcgccatcaccagcgactatgtcgtagtgggtaaagccgcttacggactatgggcgcagcgtcaatgacgctgacggtacaggccagacaattattgtctggtatagtccgtaagaggcatcagag

SEQ ID NO: 2325 - RNA, 147 nt, synthetic construct
  source 1..147: mol_type = other RNA
actggcgcttctatctgattactctgagcgccatcaccagcgactatgtcgtagtgggtaaagccgcttacgggtgggcgcagcgtcaatgacgctgacggtacaggccagacaattattgtctggtacccgtaagaggcatcagag

SEQ ID NO: 2326 - RNA, 157 nt, synthetic construct
  source 1..157: mol_type = other RNA
actggcgcttctatctgattactctgagcgccatcaccagcgactatgtcgtagtgggtaaagccgcttacggactatgggcgcagcgtcaatgacgctgacggtacaggccacatgaggatcacccatgtggtatagtccgtaagaggcatcagag

SEQ ID NO: 2327 - RNA, 143 nt, synthetic construct
  source 1..143: mol_type = other RNA
actggcgcttttatctgattactttgagagccatcaccagcgactatgtcgtagtgggtaaagctccctatgggcgcagcgtcaatgacgctgacggtacaggccacatgaggatcacccatgtggtatagggagcatcaaag

SEQ ID NO: 2328 - RNA, 167 nt, synthetic construct
  source 1..167: mol_type = other RNA
actggcgcttctatctgattactctgagcgccatcaccagcgactatgtcgtagtgggtaaagccgcttacggactatgggcgcagctcatgaggatcacccatgagctgacggtacaggccacatgaggatcacccatgtggtatagtccgtaagaggcatcagag

SEQ ID NO: 2329 - RNA, 153 nt, synthetic construct
  source 1..153: mol_type = other RNA
actggcgcttttatctgattactttgagagccatcaccagcgactatgtcgtagtgggtaaagctccctatgggcgcagctcatgaggatcacccatgagctgacggtacaggccacatgaggatcacccatgtggtatagggagcatcaaag

SEQ ID NO: 2330 - RNA, 163 nt, synthetic construct
  source 1..163: mol_type = other RNA
actggcgcttctatctgattactctgagcgccatcaccagcgactatgtcgtagtgggtaaagccgcttacggactatgggcgcagcgtcaatgacgctgacggtacaggccacatggcagtcgtaacgacgcgggtggtatagtccgtaagaggcatcagag

SEQ ID NO: 2331 - RNA, 149 nt, synthetic construct
  source 1..149: mol_type = other RNA
actggcgcttttatctgattactttgagagccatcaccagcgactatgtcgtagtgggtaaagctccctatgggcgcagcgtcaatgacgctgacggtacaggccacatggcagtcgtaacgacgcgggtggtatagggagcatcaaag

SEQ ID NO: 2332 - RNA, 46 nt, synthetic construct
  source 1..46: mol_type = other RNA
actggcgcttttatctgattactttgagagccatcannnatcaaag

SEQ ID NO: 2333 - RNA, 28 nt, synthetic construct
  source 1..28: mol_type = other RNA
ggctcgtgtagctcattagctccgagcc

SEQ ID NO: 2334 - RNA, 30 nt, synthetic construct
  source 1..30: mol_type = other RNA
ccgtgtgcatccgcagtgtcggatccacgg

SEQ ID NO: 2335 - RNA, 28 nt, synthetic construct
  source 1..28: mol_type = other RNA
ggctcgtgtagctcattagctccgagcc

SEQ ID NO: 2336 - RNA, 23 nt, synthetic construct
  source 1..23: mol_type = other RNA
aaaacataaggaaaacctatgtt

SEQ ID NO: 2337 - RNA, 15 nt, synthetic construct
  source 1..15: mol_type = other RNA
gccctgaagaagggc

SEQ ID NO: 2338 - protein, 54 aa, unidentified
  source 1..54: note = Deltaproteobacteria sp.
EKRINKIRKKLSADNATKPVSRSGPMKTLLVRVMTDDLKKRLEKRRKKPEVMPQ

SEQ ID NO: 2339 - protein, 44 aa, unidentified
  source 1..44: note = Deltaproteobacteria sp.
VISNNAANNLRMLLDDYTKMKEAILQVYWQEFKDDHVGLMCKFA

SEQ ID NO: 2340 - protein, 91 aa, unidentified
  source 1..91: note = Deltaproteobacteria sp.
QPASKKIDQNKLKPEMDEKGNLTTAGFACSQCGQPLFVYKLEQVSEKGKAYTNYFGRCNVAEHEKLILLAQLKPEKDSDEAVTYSLGKFGQ

SEQ ID NO: 2341 - protein, 141 aa, unidentified
  source 1..141: note = Deltaproteobacteria sp.
RALDFYSIHVTKESTHPVKPLAQIAGNRYASGPVGKALSDACMGTIASFLSKYQDIIIEHQKVVKGNQKRLESLRELAGKENLEYPSVTLPPQPHTKEGVDAYNEVIARVRMWVNLNLWQKLKLSRDDAKPLLRLKGFPSF

SEQ ID NO: 2342 - protein, 177 aa, unidentified
  source 1..177: note = Deltaproteobacteria sp.
PVVERRENEVDWWNTINEVKKLIDAKRDMGRVFWSGVTAEKRNTILEGYNYLPNENDHKKREGSLENPKKPAKRQFGDLLLYLEKKYAGDWGKVFDEAWERIDKKIAGLTSHIEREEARNAEDAQSKAVLTDWLRAKASFVLERLKEMDEKEFYACEIQLQKWYGDLRGNPFAVEAE

SEQ ID NO: 2343 - protein, 151 aa, unidentified
  source 1..151: note = Deltaproteobacteria sp.
NRVVDISGFSIGSDGHSIQYRNLLAWKYLENGKREFYLLMNYGKKGRIRFTDGTDIKKSGKWQGLLYGGGKAKVIDLTFDPDDEQLIILPLAFGTRQGREFIWNDLLSLETGLIKLANGRVIEKTIYNKKIGRDEPALFVALTFERREVVD

SEQ ID NO: 2344 - protein, 164 aa, unidentified
  source 1..164: note = Deltaproteobacteria sp.
PSNIKPVNLIGVDRGENIPAVIALTDPEGCPLPEFKDSSGGPTDILRIGEGYKEKQRAIQAAKEVEQRRAGGYSRKFASKSRNLADDMVRNSARDLFYHAVTHDAVLVFENLSRGFGRQGKRTFMTERQYTKMEDWLTAKLAYEGLTSKTYLSKTLAQYTSKTC

SEQ ID NO: 2345 - protein, 110 aa, unidentified
  source 1..110: note = Deltaproteobacteria sp.
SNCGFTITTADYDGMLVRLKKTSDGWATTLNNKELKAEGQITYYNRYKRQTVEKELSAELDRLSEESGNNDISKWTKGRRDEALFLLKKRFSHRPVQEQFVCLDCGHEVH

SEQ ID NO: 2346 - protein, 53 aa, unidentified
  source 1..53: note = Deltaproteobacteria sp.
ADEQAALNIARSWLFLNSNSTEFKSYKSGKQPFVGAWQAFYKRRLKEVWKPNA

SEQ ID NO: 2347 - protein, 56 aa, unidentified
  source 1..56: note = Planctomycetes sp.
QEIKRINKIRRRLVKDSNTKKAGKTGPMKTLLVRVMTPDLRERLENLRKKPENIPQ

SEQ ID NO: 2348 - protein, 44 aa, unidentified
  source 1..44: note = Planctomycetes sp.
PISNTSRANLNKLLTDYTEMKKAILHVYWEEFQKDPVGLMSRVA

SEQ ID NO: 2349 - protein, 90 aa, unidentified
  source 1..90: note = Planctomycetes sp.
QPAPKNIDQRKLIPVKDGNERLTSSGFACSQCCQPLYVYKLEQVNDKGKPHTNYFGRCNVSEHERLILLSPHKPEANDELVTYSLGKFGQ

SEQ ID NO: 2350 - protein, 141 aa, unidentified
  source 1..141: note = Planctomycetes sp.
RALDFYSIHVTRESNHPVKPLEQIGGNSCASGPVGKALSDACMGAVASFLTKYQDIILEHQKVIKKNEKRLANLKDIASANGLAFPKITLPPQPHTKEGIEAYNNVVAQIVIWVNLNLWQKLKIGRDEAKPLQRLKGFPSF

SEQ ID NO: 2351 - protein, 168 aa, unidentified
  source 1..168: note = Planctomycetes sp.
PLVERQANEVDWWDMVCNVKKLINEKKEDGKVFWQNLAGYKRQEALLPYLSSEEDRKKGKKFARYQFGDLLLHLEKKHGEDWGKVYDEAWERIDKKVEGLSKHIKLEEERRSEDAQSKAALTDWLRAKASFVIEGLKEADKDEFCRCELKLQKWYGDLRGKPFAIEAE

SEQ ID NO: 2352 - protein, 146 aa, unidentified
  source 1..146: note = Planctomycetes sp.
NSILDISGFSKQYNCAFIWQKDGVKKLNLYLIINYFKGGKLRFKKIKPEAFEANRFYTVINKKSGEIVPMEVNFNFDDPNLIILPLAFGKRQGREFIWNDLLSLETGSLKLANGRVIEKTLYNRRTRQDEPALFVALTFERREVLD

SEQ ID NO: 2353 - protein, 164 aa, unidentified
  source 1..164: note = Planctomycetes sp.
SSNIKPMNLIGIDRGENIPAVIALTDPEGCPLSRFKDSLGNPTHILRIGESYKEKQRTIQAAKEVEQRRAGGYSRKYASKAKNLADDMVRNTARDLLYYAVTQDAMLIFENLSRGFGRQGKRTFMAERQYTRMEDWLTAKLAYEGLPSKTYLSKTLAQYTSKTC

SEQ ID NO: 2354 - protein, 110 aa, unidentified
  source 1..110: note = Planctomycetes sp.
SNCGFTITSADYDRVLEKLKKTATGWMTTINGKELKVEGQITYYNRYKRQNVVKDLSVELDRLSEESVNNDISSWTKGRSGEALSLLKKRFSHRPVQEKFVCLNCGFETH

SEQ ID NO: 2355 - protein, 58 aa, unidentified
  source 1..58: note = Planctomycetes sp.
ADEQAALNIARSWLFLRSQEYKKYQTNKTTGNTDKRAFVETWQSFYRKKLKEVWKPAV

SEQ ID NO: 2356 - protein, 979 aa, synthetic construct
QEIKRINKIRRRLVKDSNTKKAGKTGPMKTLLVRVMTPDLRERLENLRKKPENIPQPISNTSRANLNKLLTDYTEMKKAILHVYWEEFQKDPVGLMSRVAQPASKKIDQNKLKPEMDEKGNLTTAGFACSQCGQPLFVYKLEQVSEKGKAYTNYFGRCNVAEHEKLILLAQLKPEKDSDEAVTYSLGKFGQRALDFYSIHVTKESTHPVKPLAQIAGNRYASGPVGKALSDACMGTIASFLSKYQDIIIEHQKVVKGNQKRLESLRELAGKENLEYPSVTLPPQPHTKEGVDAYNEVIARVRMWVNLNLWQKLKLSRDDAKPLLRLKGFPSFPLVERQANEVDWWDMVCNVKKLINEKKEDGKVFWQNLAGYKRQEALRPYLSSEEDRKKGKKFARYQLGDLLLHLEKKHGEDWGKVYDEAWERIDKKVEGLSKHIKLEEERRSEDAQSKAALTDWLRAKASFVIEGLKEADKDEFCRCELKLQKWYGDLRGKPFAIEAENSILDISGFSKQYNCAFIWQKDGVKKLNLYLIINYFKGGKLRFKKIKPEAFEANRFYTVINKKSGEIVPMEVNFNFDDPNLIILPLAFGKRQGREFIWNDLLSLETGSLKLANGRVIEKTLYNARRTRQDEPALFVALTFERREVLDSSNIKPMNLIGVDRGENIPAVIALTDPEGCPLSRFKDSLGNPTHILRIGESYKEKQRTIQAKKEVEQRRAGGYSRKYASKAKNLADDMVRNTARDLLYYAVTQDAMLIFENLSRGFGRQGKRTFMAERQYTRMEDWLTAKLAYEGLPSKTYLSKTLAQYTSKTCSNCGFTITSADYDRVLEKLKKTATGWMTTINGKELKVEGQITYYNRYKRQNVVKDLSVELDRLSEESVNNDISSWTKGRSGEALSLLKKRFSHRPVQEKFVCLNCGFETHADEQAALNIARSWLFLRSQEYKKYQTNKTTGNTDKRAFVETWQSFYRKKLKEVWKPAV

SEQ ID NO: 2357 - protein, 978 aa, synthetic construct
QEIKRINKIRRRLVKDSNTKKAGKTGPMKTLLVRVMTPDLRERLENLRKKPENIPQPISNTSRANLNKLLTDYTEMKKAILHVYWEEFQVDPVGLMSRVAQPASKKIDQNKLKPEMDEKGNLTTAGFACSQCGQPLFVYKLEQVSEKGKAYTNYFGRCNVAEHEKLILLAQLKPEKDSDEAVTYSLGKFGQRALDFYSIHVTKESTHPVKPLAQIAGNRYASGPVGKALSDACMGTIASFLSKYQDIIIEHQKVVKGNQKRLESLRELAGKENLEYPSVTLPPQPHTKEGVDAYNEVIARVRMWVNLNLWQKLKLSRDDAKPLLRLKGFPSFPLVERQANEVDWWDMVCNVKKLINEKKEDGKVFWQNLAGYKRQEALRPYLSSEEDRKKGKKFARYQLGDLLLHLEKKHGEDWGKVYDEAWERIDKKVEGLSKHIKLEEERRSEDAQSKAALTDWLRAKASFVIEGLKEADKDEFCRCELKLQKWYGDLRGKPFAIEAENSILDISGFSKQYNCAFIWQKDGVKKLNLYLIINYFKGGKLRFKKIKPEAFEANRFYTVINKKSGEIVPMEVNFNFDDPNLIILPLAFGKRQGREFIWNDLLSLETGSLKLANGRVIEKTLYNRRTRQDEPALFVALTFERREVLDSSNIKPMNLIGVDRGENIPAVIALTDPEGCPLSRFKDSLGNPTHILRIGESYKEKQRTIQAKKEVEQRRAGGYSRKYASKAKNLADDMVRNTARDLLYYAVTQDAMLIFENLSRGFGRQGKRTFMAERQYTRMEDWLTAKLAYEGLPSKTYLSKTLAQYTSKTCSNCGFTITSADYDRVLEKLKKTATGWMTTINGKELKVEGQITYYNRYKRQNVVKDLSVELDRLSEESVNNDISSWTKGRSGEALSLLKKRFSHRPVQEKFVCLNCGFETHADEQAALNIARSWLFLRSQEYKKYQTNKTTGNTDKRAFVETWQSFYRKKLKEVWKPAV

SEQ ID NO: 2358 - protein, 979 aa, synthetic construct
QEIKRINKIRRRLVKDSNTKKAGKTGPMKTLLVRVMTPDLRERLENLRKKPENIPQPISNTSRANLNKLLTDYTEMKKAILHVYWEGEFQKDPVGLMSRVAQPASKKIDQNKLKPEMDEKGNLTTAGFACSQCGQPLFVYKLEQVSEKGKAYTNYFGRCNVAEHEKLILLAQLKPEKDSDEAVTYSLGKFGQRALDFYSIHVTKESTHPVKPLAQIAGNRYASGPVGKALSDACMGTIASFLSKYQDIIIEHQKVVKGNQKRLESLRELAGKENLEYPSVTLPPQPHTKEGVDAYNEVIARVRMWVNLNLWQKLKLSRDDAKPLLRLKGFPSFPLVERQANEVDWWDMVCNVKKLINEKKEDGKVFWQNLAGYKRQEALRPYLSSEEDRKKGKKFARYQLGDLLLHLEKKHGEDWGKVYDEAWERIDKKVEGLSKHIKLEEERRSEDAQSKAALTDWLRAKASFVIEGLKEADKDEFCRCELKLQKWYGDLRGKPFAIEAENSILDISGFSKQYNCAFIWQKDGVKKLNLYLIINYFKGGKLRFKKIKPEAFEANRFYTVINKKSGEIVPMEVNFNFDDPNLIILPLAFGKRQGREFIWNDLLSLETGSLKLANGRVIEKTLYNRRTRQDEPALFVALTFERREVLDSSNIKPMNLIGVDRGENIPAVIALTDPEGCPLSRFKDSLGNPTHILRIGESYKEKQRTIQAKKEVEQRRAGGYSRKYASKAKNLADDMVRNTARDLLYYAVTQDAMLIFENLSRGFGRQGKRTFMAERQYTRMEDWLTAKLAYEGLPSKTYLSKTLAQYTSKTCSNCGFTITSADYDRVLEKLKKTATGWMTTINGKELKVEGQITYYNRYKRQNVVKDLSVELDRLSEESVNNDISSWTKGRSGEALSLLKKRFSHRPVQEKFVCLNCGFETHADEQAALNIARSWLFLRSQEYKKYQTNKTTGNTDKRAFVETWQSFYRKKLKEVWKPAV

SEQ ID NO: 2359 - protein, 978 aa, synthetic construct
QEIKRINKIRRRLVKDSNTKKAGKTGPMKTLLVRVMTPDLRERLENLRKKPENIPQPISNTSRANLNKLLTDYTEMKKAILHVYWEEFQKDPVGLMSRVAQPASKKIDQNKLKPEMDEKGNLTTAGFACSQCGQPLFVYKLEQVSEKGKAYTNYFGRCNVAEHEKLILLAQLKPEKDSDEAVTYSLGKFGQRALDFYSIHVTKESTHPVKPLAQIAGNRYASGPVGKALSDACMGTIASFLSKYQDIIIEHQKVVKGNQKRLEHLRELAGKENLEYPSVTLPPQPHTKEGVDAYNEVIARVRMWVNLNLWQKLKLSRDDAKPLLRLKGFPSFPLVERQANEVDWWDMVCNVKKLINEKKEDGKVFWQNLAGYKRQEALRPYLSSEEDRKKGKKFARYQLGDLLLHLEKKHGEDWGKVYDEAWERIDKKVEGLSKHIKLEEERRSEDAQSKAALTDWLRAKASFVIEGLKEADKDEFCRCELKLQKWYGDLRGKPFAIEAENSILDISGFSKQYNCAFIWQKDGVKKLNLYLIINYFKGGKLRFKKIKPEAFEANRFYTVINKKSGEIVPMEVNFNFDDPNLIILPLAFGKRQGREFIWNDLLSLETGSLKLANGRVIEKTLYNRRTRQDEPALFVALTFERREVLDSSNIKPMNLIGVDRGENIPAVIALTDPEGCPLSRFKDSLGNPTHILRIGESYKEKQRTIQAKKEVEQRRAGGYSRKYASKAKNLADDMVRNTARDLLYYAVTQDAMLIFENLSRGFGRQGKRTFMAERQYTRMEDWLTAKLAYEGLPSKTYLSKTLAQYTSKTCSNCGFTITSADYDRVLEKLKKTATGWMTTINGKELKVEGQITYYNRYKRQNVVKDLSVELDRLSEESVNNDISSWTKGRSGEALSLLKKRFSHRPVQEKFVCLNCGFETHADEQAALNIARSWLFLRSQEYKKYQTNKTTGNTDKRAFVETWQSFYRKKLKEVWKPAV

SEQ ID NO: 2360 - protein, 979 aa, synthetic construct
QEIKRINKIRRRLVKDSNTKKAGKTGPMKTLLVRVMTPDLRERLENLRKKPENIPQPISNTSRANLNKLLTDYTEMKKAILHVYWEEFQKDPVGLMSRVAQPASKKIDQNKLKPEMDEKGNLTTAGFACSQCGQPLFVYKLEQVSEKGKAYTNYFGRCNVAEHEKLILLAQLKPEKDSDEAVTYSLGKFGQRALDFYSIHVTKESTHPVKPLAQICAGNRYASGPVGKALSDACMGTIASFLSKYQDIIIEHQKVVKGNQKRLESLRELAGKENLEYPSVTLPPQPHTKEGVDAYNEVIARVRMWVNLNLWQKLKLSRDDAKPLLRLKGFPSFPLVERQANEVDWWDMVCNVKKLINEKKEDGKVFWQNLAGYKRQEALRPYLSSEEDRKKGKKFARYQLGDLLLHLEKKHGEDWGKVYDEAWERIDKKVEGLSKHIKLEEERRSEDAQSKAALTDWLRAKASFVIEGLKEADKDEFCRCELKLQKWYGDLRGKPFAIEAENSILDISGFSKQYNCAFIWQKDGVKKLNLYLIINYFKGGKLRFKKIKPEAFEANRFYTVINKKSGEIVPMEVNFNFDDPNLIILPLAFGKRQGREFIWNDLLSLETGSLKLANGRVIEKTLYNRRTRQDEPALFVALTFERREVLDSSNIKPMNLIGVDRGENIPAVIALTDPEGCPLSRFKDSLGNPTHILRIGESYKEKQRTIQAKKEVEQRRAGGYSRKYASKAKNLADDMVRNTARDLLYYAVTQDAMLIFENLSRGFGRQGKRTFMAERQYTRMEDWLTAKLAYEGLPSKTYLSKTLAQYTSKTCSNCGFTITSADYDRVLEKLKKTATGWMTTINGKELKVEGQITYYNRYKRQNVVKDLSVELDRLSEESVNNDISSWTKGRSGEALSLLKKRFSHRPVQEKFVCLNCGFETHADEQAALNIARSWLFLRSQEYKKYQTNKTTGNTDKRAFVETWQSFYRKKLKEVWKPAV

SEQ ID NO: 2361 - protein, 976 aa, synthetic construct
QEIKRINKIRRRLVKDSNTKKAGKTGPMKTLLVRVMTPDLRERLENLRKKPENIPQPISNTSRANLNKLLTDYTEMKKAILHVYWEEFQKDPVGLMSRVAQPASKKIDQNKLKPEMDEKGNLTTAGFACSQCGQPLFVYKLEQVSEKGKAYTNYFGRCNVAEHEKLILLAQLKPEKDSDEAVTYSLGKFGQRALDFYSIHVTKESTHPVKPLAQIAGNRYASGPVGKALSDACMGTIASFLSKYQDIIIEHQKVVKGNQKRLESLRELAGKENLEYPSVTLPPQPHTKEGVDAYNEVIARVRMWVNLNLWQKLKLSRDDAKPLLRLKGFPSFPLVERQANEVDWWVCNVKKLINEKKEDGKVFWQNLAGYKRQEALRPYLSSEEDRKKGKKFARYQLGDLLLHLEKKHGEDWGKVYDEAWERIDKKVEGLSKHIKLEEERRSEDAQSKAALTDWLRAKASFVIEGLKEADKDEFCRCELKLQKWYGDLRGKPFAIEAENSILDISGFSKQYNCAFIWQKDGVKKLNLYLIINYFKGGKLRFKKIKPEAFEANRFYTVINKKSGEIVPMEVNFNFDDPNLIILPLAFGKRQGREFIWNDLLSLETGSLKLANGRVIEKTLYNRRTRQDEPALFVALTFERREVLDSSNIKPMNLIGVDRGENIPAVIALTDPEGCPLSRFKDSLGNPTHILRIGESYKEKQRTIQAKKEVEQRRAGGYSRKYASKAKNLADDMVRNTARDLLYYAVTQDAMLIFENLSRGFGRQGKRTFMAERQYTRMEDWLTAKLAYEGLPSKTYLSKTLAQYTSKTCSNCGFTITSADYDRVLEKLKKTATGWMTTINGKELKVEGQITYYNRYKRQNVVKDLSVELDRLSEESVNNDISSWTKGRSGEALSLLKKRFSHRPVQEKFVCLNCGFETHADEQAALNIARSWLFLRSQEYKKYQTNKTTGNTDKRAFVETWQSFYRKKLKEVWKPAV

SEQ ID NO: 2362 - protein, 978 aa, synthetic construct
QEIKRINKIRRRLVKDSNTKKAGKTGPMKTLLVRVMTPDLRERLENLRKKPENIPQPISNTSRANLNKLLTDYTEMKKAILHVYWEEFQKDPVGLMSRVAQPASKKIDQNKLKPEMDEKGNLTTAGFACSQCGQPLFVYKLEQVSEKGKAYTNYFGRCNVAEHEKLILLAQLKPEKDSDEAVTYSLGKFGQRALDFYSIHVTKESTHPVKPLAQIAGNRYASGPVGKALSDACMGTIASFLSKYQDIIIEHQKVVKGNQKRLESLRELAGKENLEYPSVTLPPQPHTKEGVDAYNEVIARVRMWVNLNLWQKLKLSRDDAKPLLRLKGFPSFPLVERQANEVDWWDMVCNVKKLINEKKEDGKVFWQNLAGYKRQEALRPYLSSEEDRKKGKKFARYQLGDLLLHLEKKHGEDWGKVYDEAWERIDKKVEGLSKHIKLEEERRSEDAQSKAALTDWLRAKASFVIEGLKEADKDEFCRCELKLQKWYGDLRGKPFAIEAENSILDISGFSKQYNCAFIWQKDGVKKLNLYLIINYFGGGKLRFKKIKPEAFEANRFYTVINKKSGEIVPMEVNFNFDDPNLIILPLAFGKRQGREFIWNDLLSLETGSLKLANGRVIEKTLYNRRTRQDEPALFVALTFERREVLDSSNIKPMNLIGVDRGENIPAVIALTDPEGCPLSRFKDSLGNPTHILRIGESYKEKQRTIQAKKEVEQRRAGGYSRKYASKAKNLADDMVRNTARDLLYYAVTQDAMLIFENLSRGFGRQGKRTFMAERQYTRMEDWLTAKLAYEGLPSKTYLSKTLAQYTSKTCSNCGFTITSADYDRVLEKLKKTATGWMTTINGKELKVEGQITYYNRYKRQNVVKDLSVELDRLSEESVNNDISSWTKGRSGEALSLLKKRFSHRPVQEKFVCLNCGFETHADEQAALNIARSWLFLRSQEYKKYQTNKTTGNTDKRAFVETWQSFYRKKLKEVWKPAV

SEQ ID NO: 2363 - protein, 979 aa, synthetic construct
QEIKRINKIRRRLVKDSNTKKAGKTGPMKTLLVRVMTPDLRERLENLRKKPENIPQPISNTSRANLNKLLTDYTEMKKAILHVYWEEFQKDPVGLMSRVAQPASKKIDQNKLKPEMDEKGNLTTAGFACSQCGQPLFVYKLEQVSEKGKAYTNYFGRCNVAEHEKLILLAQLKPEKDSDEAVTYSLGKFGQRALDFYSIHVTKESTHPVKPLAQIAGNRYASGPVGKALSDACMGTIASFLSKYQDIIIEHQKVVKGNQKRLESLRELAGKENLEYPSVTLPPQPHTKEGVDAYNEVIARVRMWVNLNLWQKLKLSRDDAKPLLRLKGFPSFPLVERQANEVDWWDMVCNVKKLINEKKEDGKVFWQNLAGYKRQEALRPYLSSEEDRKKGKKFARYQLGDLLLHLEKKHGEDWGKLVYDEAWERIDKKVEGLSKHIKLEEERRSEDAQSKAALTDWLRAKASFVIEGLKEADKDEFCRCELKLQKWYGDLRGKPFAIEAENSILDISGFSKQYNCAFIWQKDGVKKLNLYLIINYFKGGKLRFKKIKPEAFEANRFYTVINKKSGEIVPMEVNFNFDDPNLIILPLAFGKRQGREFIWNDLLSLETGSLKLANGRVIEKTLYNRRTRQDEPALFVALTFERREVLDSSNIKPMNLIGVDRGENIPAVIALTDPEGCPLSRFKDSLGNPTHILRIGESYKEKQRTIQAKKEVEQRRAGGYSRKYASKAKNLADDMVRNTARDLLYYAVTQDAMLIFENLSRGFGRQGKRTFMAERQYTRMEDWLTAKLAYEGLPSKTYLSKTLAQYTSKTCSNCGFTITSADYDRVLEKLKKTATGWMTTINGKELKVEGQITYYNRYKRQNVVKDLSVELDRLSEESVNNDISSWTKGRSGEALSLLKKRFSHRPVQEKFVCLNCGFETHADEQAALNIARSWLFLRSQEYKKYQTNKTTGNTDKRAFVETWQSFYRKKLKEVWKPAV

SEQ ID NO: 2364 - protein, 979 aa, synthetic construct
QEIKRINKIRRRLVKDSNTKKAGKTGPMKTLLVRVMTPDLRERLENLRKKPENIPQPISNTSRANLNKLLTDYTEMKKAILHVYWEEFQKDPVGLMSRVAQPASKKIDQNKLKPEMDEKGNLTTAGFACSQCGQPLFVYKLEQVSEKGKAYTNYFGRCNVAEHEKLILLAQLKPEKDSDEAVTYSLGKFGQRALDFYSIHVTKESTHPVKPLAQIAGNRYASGPVGKALSDACMGTIASFLSKYQDIIIEHQKVVKGNQKRLESLRELAGKENLEYPSVTLPPQPHTKEGVDAYNEVIARVRMWVNLNLWQKLKLSRDDAKPLLRLKGQFPSFPLVERQANEVDWWDMVCNVKKLINEKKEDGKVFWQNLAGYKRQEALRPYLSSEEDRKKGKKFARYQLGDLLLHLEKKHGEDWGKVYDEAWERIDKKVEGLSKHIKLEEERRSEDAQSKAALTDWLRAKASFVIEGLKEADKDEFCRCELKLQKWYGDLRGKPFAIEAENSILDISGFSKQYNCAFIWQKDGVKKLNLYLIINYFKGGKLRFKKIKPEAFEANRFYTVINKKSGEIVPMEVNFNFDDPNLIILPLAFGKRQGREFIWNDLLSLETGSLKLANGRVIEKTLYNRRTRQDEPALFVALTFERREVLDSSNIKPMNLIGVDRGENIPAVIALTDPEGCPLSRFKDSLGNPTHILRIGESYKEKQRTIQAKKEVEQRRAGGYSRKYASKAKNLADDMVRNTARDLLYYAVTQDAMLIFENLSRGFGRQGKRTFMAERQYTRMEDWLTAKLAYEGLPSKTYLSKTLAQYTSKTCSNCGFTITSADYDRVLEKLKKTATGWMTTINGKELKVEGQITYYNRYKRQNVVKDLSVELDRLSEESVNNDISSWTKGRSGEALSLLKKRFSHRPVQEKFVCLNCGFETHADEQAALNIARSWLFLRSQEYKKYQTNKTTGNTDKRAFVETWQSFYRKKLKEVWKPAV

SEQ ID NO: 2365 - protein, 978 aa, synthetic construct
QEIKRINKIRRRLVKDSNTKKAGKTGPMKTLLVRVMTPDLRERLENLRKKPENIPQPISNTSRANLNKLLTDYTEMKKAILHVYWEEFQKDPVGLMSRVAQPASKKIDQNKLKPEMDEKGNLTTAGFACSQCGQPLFVYKLEQVSEKGKAYTNYFGRCNVAEHEKLILLAQLKPEKDSDEAVTYSLGKFGQRALDFYSIHVTKESTHPVKPLAQIAGNRYASGPVGKALSDACMGTIASFLSKYQDIIIEHQKVVKGNQKRLESLRELAGKENLEYPSVTLPPQPHTKEGVDAYNEVIARVRMWVNLNLWQKLKLSRDDAKPLLRLKGFPSFPLVERQANEVSWWDMVCNVKKLINEKKEDGKVFWQNLAGYKRQEALRPYLSSEEDRKKGKKFARYQLGDLLLHLEKKHGEDWGKVYDEAWERIDKKVEGLSKHIKLEEERRSEDAQSKAALTDWLRAKASFVIEGLKEADKDEFCRCELKLQKWYGDLRGKPFAIEAENSILDISGFSKQYNCAFIWQKDGVKKLNLYLIINYFKGGKLRFKKIKPEAFEANRFYTVINKKSGEIVPMEVNFNFDDPNLIILPLAFGKRQGREFIWNDLLSLETGSLKLANGRVIEKTLYNRRTRQDEPALFVALTFERREVLDSSNIKPMNLIGVDRGENIPAVIALTDPEGCPLSRFKDSLGNPTHILRIGESYKEKQRTIQAKKEVEQRRAGGYSRKYASKAKNLADDMVRNTARDLLYYAVTQDAMLIFENLSRGFGRQGKRTFMAERQYTRMEDWLTAKLAYEGLPSKTYLSKTLAQYTSKTCSNCGFTITSADYDRVLEKLKKTATGWMTTINGKELKVEGQITYYNRYKRQNVVKDLSVELDRLSEESVNNDISSWTKGRSGEALSLLKKRFSHRPVQEKFVCLNCGFETHADEQAALNIARSWLFLRSQEYKKYQTNKTTGNTDKRAFVETWQSFYRKKLKEVWKPAV

SEQ ID NO: 2366 - protein, 978 aa, synthetic construct
QEIKRINKIRRRLVKDSNTKKAGKTGPMKTLLVRVMTPDLRERLENLRKKPENIPQPISNTSRANLNKLLTDYTEMKKAILHVYWEEFQKDPVGLMSRVAQPASKKIDQNKLKPEMDEKGNLTTAGFACSQCGQPLFVYKLEQVSEKGKAYTNYFGRCNVAEHEKLILLAQLKPEKDSDEAVTYSLGKFGQRALDFYSIHVTKESTHPVKPLAQIAGNRYASGPVGKALSDACMGTIASFLSKYQDIIIEHQKVVKGNQKRLESLRELAGKENLEYPSVTLPPQPHTKEGVDAYNEVIARVRMWVNLNLWQKLKLSRDDAKPLLRLKGFPSFPLVERQANEVDWWDMVCNVKKLINEKKEDGKVFWQNLAGYKRQEALRPYLSSEEDRKKGKKFARYQLGDLLLHLEKKHGEDWGKVYDEAWERIDKKVEGLSKHIKLEEERRSEDAQSKAALTDWLREKASFVIEGLKEADKDEFCRCELKLQKWYGDLRGKPFAIEAENSILDISGFSKQYNCAFIWQKDGVKKLNLYLIINYFKGGKLRFKKIKPEAFEANRFYTVINKKSGEIVPMEVNFNFDDPNLIILPLAFGKRQGREFIWNDLLSLETGSLKLANGRVIEKTLYNRRTRQDEPALFVALTFERREVLDSSNIKPMNLIGVDRGENIPAVIALTDPEGCPLSRFKDSLGNPTHILRIGESYKEKQRTIQAKKEVEQRRAGGYSRKYASKAKNLADDMVRNTARDLLYYAVTQDAMLIFENLSRGFGRQGKRTFMAERQYTRMEDWLTAKLAYEGLPSKTYLSKTLAQYTSKTCSNCGFTITSADYDRVLEKLKKTATGWMTTINGKELKVEGQITYYNRYKRQNVVKDLSVELDRLSEESVNNDISSWTKGRSGEALSLLKKRFSHRPVQEKFVCLNCGFETHADEQAALNIARSWLFLRSQEYKKYQTNKTTGNTDKRAFVETWQSFYRKKLKEVWKPAV

SEQ ID NO: 2367 - protein, 978 aa, synthetic construct
QEIKRINKIRRRLVKDSNTKKAGKTGPMKTLLVRVMTPDLRERLENLRKKPENIPQPISNTSRANLNKLLTDYTEMKKAILHVYWEEFQKDPVGLMSRVAQPASKKIDQNKLKPEMDEKGNLTTAGFACSQCGQPLFVYKLEQVSEKGKAYTNYFGRCNVAEHEKLILLAQLKPEKDSDEAVTYSLGKFGQRALDFYSIHVTKESTHPVKPLAQIAGNRYASGPVGKALSDACMGTIASFLSKYQDIIIEHQKVVKGNQKRLESLRELAGKENLEYPSVTLPPQPHTKEGVDAYNEVIARVRMWVNLNLWQKLKLSRDDAKPLLRLKGFPSFPLVERQANEVDWWDMVCNVKKLINEKKEDGKVFWQNLAGYKRQEALRPYLSSEEDRKKGKKFARYQLGDLLLHLEKKHGEDWGKVYDEAWERIDKKVEGLSKHIKLEEERRSEDAQSKAALTDWLRAKASFVIEGLKEADKDEFCRCELKLQKWYGDLRGKPFAIEAENSILDISGFSKQYNCAFIWQKDGVKKLNLYLIINYFKGGKLRFKKIKPEAFEANRFYTVINKKSGEIVPMEVNFNFDDPNLIILPLAFGKRQGREFIWNDLLSLETGSLKLANGRVIEKTTYNRRTRQDEPALFVALTFERREVLDSSNIKPMNLIGVDRGENIPAVIALTDPEGCPLSRFKDSLGNPTHILRIGESYKEKQRTIQAKKEVEQRRAGGYSRKYASKAKNLADDMVRNTARDLLYYAVTQDAMLIFENLSRGFGRQGKRTFMAERQYTRMEDWLTAKLAYEGLPSKTYLSKTLAQYTSKTCSNCGFTITSADYDRVLEKLKKTATGWMTTINGKELKVEGQITYYNRYKRQNVVKDLSVELDRLSEESVNNDISSWTKGRSGEALSLLKKRFSHRPVQEKFVCLNCGFETHADEQAALNIARSWLFLRSQEYKKYQTNKTTGNTDKRAFVETWQSFYRKKLKEVWKPAV

SEQ ID NO: 2368 - protein, 978 aa, synthetic construct
QEIKRINKIRRRLVKDSNTKKAGKTGPMKTLLVRVMTPDLRERLENLRKKPENIPQPISNTSRANLNKLLTDYTEMKKAILHVYWEEFQKDPVGLMSRVAQPASKKIDQNKLKPEMDEKGNLTTAGFACSQCGQPLFVYKLEQVSEKGKAYTNYFGRCNVAEHEKLILLAQLKPEKDSDEAVTYSLGKFGQRALDFYSIHVTKESTHPVKPLAQIAGNRYASGPVGKALSDACMGTIASFLSKYQDIIIEHQKVVKGNQKRLESLRELAGKENLEYPSVTLPPQPHTKEGVDAYNEVIARVRMWVNLNLWQKLKLSRDDAKPLLRLKGFPSFPLVERQANEVDWWDMVCNVKKLINEKKEDGKVFWQNLAGYKRQEANRPYLSSEEDRKKGKKFARYQLGDLLLHLEKKHGEDWGKVYDEAWERIDKKVEGLSKHIKLEEERRSEDAQSKAALTDWLRAKASFVIEGLKEADKDEFCRCELKLQKWYGDLRGKPFAIEAENSILDISGFSKQYNCAFIWQKDGVKKLNLYLIINYFKGGKLRFKKIKPEAFEANRFYTVINKKSGEIVPMEVNFNFDDPNLIILPLAFGKRQGREFIWNDLLSLETGSLKLANGRVIEKTLYNRRTRQDEPALFVALTFERREVLDSSNIKPMNLIGVDRGENIPAVIALTDPEGCPLSRFKDSLGNPTHILRIGESYKEKQRTIQAKKEVEQRRAGGYSRKYASKAKNLADDMVRNTARDLLYYAVTQDAMLIFENLSRGFGRQGKRTFMAERQYTRMEDWLTAKLAYEGLPSKTYLSKTLAQYTSKTCSNCGFTITSADYDRVLEKLKKTATGWMTTINGKELKVEGQITYYNRYKRQNVVKDLSVELDRLSEESVNNDISSWTKGRSGEALSLLKKRFSHRPVQEKFVCLNCGFETHADEQAALNIARSWLFLRSQEYKKYQTNKTTGNTDKRAFVETWQSFYRKKLKEVWKPAV

SEQ ID NO: 2369 - protein, 978 aa, synthetic construct
QEIKRINKIRRRLVKDSNTKKAGKTGPMKTLLVRVMTPDLRERLENLRKKPENIPQPISNTSRANLNKLLTDYTEMKKAILHVYWEEFQKDPVGLMSRVAQPASKKIDQNKLKPEMDEKGNLTTAGFACSQCGQPLFVYKLEQVSEKGKAYTNYFGRCNVAEHEKLILLAQLKPEKDSDEAVTYSLGKFGQRALDFYSIHVTKESTHPVKPLAQIAGNRYASGPVGKALSDACMGTIASFLSKYQDIIIEHQKVVKGNQKRLESLRELAGKENLEYPSVTLPPQPHTKEGVDAYNEVIARVRMWVNLNLWQKLKLSRDDAKPLLRLKGFPSFPLVERQANEVDWWDMVCNVKKLINEKKEDGKVFWQNLAGYKRQEALRPYLSSEEDRKKGKKFARYQLGDLLLHLEKKHGEDWGKVYDEAWERIDKKVEGLSKHIKLEELRRSEDAQSKAALTDWLRAKASFVIEGLKEADKDEFCRCELKLQKWYGDLRGKPFAIEAENSILDISGFSKQYNCAFIWQKDGVKKLNLYLIINYFKGGKLRFKKIKPEAFEANRFYTVINKKSGEIVPMEVNFNFDDPNLIILPLAFGKRQGREFIWNDLLSLETGSLKLANGRVIEKTLYNRRTRQDEPALFVALTFERREVLDSSNIKPMNLIGVDRGENIPAVIALTDPEGCPLSRFKDSLGNPTHILRIGESYKEKQRTIQAKKEVEQRRAGGYSRKYASKAKNLADDMVRNTARDLLYYAVTQDAMLIFENLSRGFGRQGKRTFMAERQYTRMEDWLTAKLAYEGLPSKTYLSKTLAQYTSKTCSNCGFTITSADYDRVLEKLKKTATGWMTTINGKELKVEGQITYYNRYKRQNVVKDLSVELDRLSEESVNNDISSWTKGRSGEALSLLKKRFSHRPVQEKFVCLNCGFETHADEQAALNIARSWLFLRSQEYKKYQTNKTTGNTDKRAFVETWQSFYRKKLKEVWKPAV

SEQ ID NO: 2370 - protein, 976 aa, synthetic construct
QEIKRINKIRRRLVKDSNTKKAGKTGPMKTLLVRVMTPDLRERLENLRKKPENIPQPISNTSRANLNKLLTDYTEMKKAILHVYWEEFQKDPVGLMSRVAQPASKKIDQNKLKPEMDEKGNLTTAGFACSQCGQPLFVYKLEQVSEKGKAYTNYFGRCNVAEHEKLILLAQLKPEKDSDEAVTYSLGKFGQRALDFYSIHVTKESTHPVKPLAQIAGNRYASGPVGKALSDACMGTIASFLSKYQDIIIEHQKVVKGNQKRLESLRELAGKENLEYPSVTLPPQPHTKEGVDAYNEVIARVRMWVNLNLWQKLKLSRDDAKPLLRLKGFPSFPLVERQANEVDWWDMVCNVKKLINEKKEDGKVFWQNLAGYKRQEALRPYLSSEEDRKKGKKFARYQLGDLLLHLEKKHGEDWGKVYDEAWERIDKKVEGLSKHIKLEEERRSEDAQSKAALTDWLRAKASFVIEGLKEADKDERCELKLQKWYGDLRGKPFAIEAENSILDISGFSKQYNCAFIWQKDGVKKLNLYLIINYFKGGKLRFKKIKPEAFEANRFYTVINKKSGEIVPMEVNFNFDDPNLIILPLAFGKRQGREFIWNDLLSLETGSLKLANGRVIEKTLYNRRTRQDEPALFVALTFERREVLDSSNIKPMNLIGVDRGENIPAVIALTDPEGCPLSRFKDSLGNPTHILRIGESYKEKQRTIQAKKEVEQRRAGGYSRKYASKAKNLADDMVRNTARDLLYYAVTQDAMLIFENLSRGFGRQGKRTFMAERQYTRMEDWLTAKLAYEGLPSKTYLSKTLAQYTSKTCSNCGFTITSADYDRVLEKLKKTATGWMTTINGKELKVEGQITYYNRYKRQNVVKDLSVELDRLSEESVNNDISSWTKGRSGEALSLLKKRFSHRPVQEKFVCLNCGFETHADEQAALNIARSWLFLRSQEYKKYQTNKTTGNTDKRAFVETWQSFYRKKLKEVWKPAV

SEQ ID NO: 2371 - protein, 976 aa, synthetic construct
QEIKRINKIRRRLVKDSNTKKAGKTGPMKTLLVRVMTPDLRERLENLRKKPENIPQPISNTSRANLNKLLTDYTEMKKAILHVYWEEFQKDPVGLMSRVAQPASKKIDQNKLKPEMDEKGNLTTAGFACSQCGQPLFVYKLEQVSEKGKAYTNYFGRCNVAEHEKLILLAQLKPEKDSDEAVTYSLGKFGQRALDFYSIHVTKESTHPVKPLAQIAGNRYASGPVGKALSDACMGTIASFLSKYQDIIIEHQKVVKGNQKRLESLRELAGKENLEYPSVTLPPQPHTKEGVDAYNEVIARVRMWVNLNLWQKLKLSRDDAKPLLRLKGFPSFPLVERQANEVDWWDMVCNVKKLINEKKEDGKVFWQNLAGYKRALRPYLSSEEDRKKGKKFARYQLGDLLLHLEKKHGEDWGKVYDEAWERIDKKVEGLSKHIKLEEERRSEDAQSKAALTDWLRAKASFVIEGLKEADKDEFCRCELKLQKWYGDLRGKPFAIEAENSILDISGFSKQYNCAFIWQKDGVKKLNLYLIINYFKGGKLRFKKIKPEAFEANRFYTVINKKSGEIVPMEVNFNFDDPNLIILPLAFGKRQGREFIWNDLLSLETGSLKLANGRVIEKTLYNRRTRQDEPALFVALTFERREVLDSSNIKPMNLIGVDRGENIPAVIALTDPEGCPLSRFKDSLGNPTHILRIGESYKEKQRTIQAKKEVEQRRAGGYSRKYASKAKNLADDMVRNTARDLLYYAVTQDAMLIFENLSRGFGRQGKRTFMAERQYTRMEDWLTAKLAYEGLPSKTYLSKTLAQYTSKTCSNCGFTITSADYDRVLEKLKKTATGWMTTINGKELKVEGQITYYNRYKRQNVVKDLSVELDRLSEESVNNDISSWTKGRSGEALSLLKKRFSHRPVQEKFVCLNCGFETHADEQAALNIARSWLFLRSQEYKKYQTNKTTGNTDKRAFVETWQSFYRKKLKEVWKPAV

SEQ ID NO: 2372 - protein, 978 aa, synthetic construct
QEIKRINKIRRRLVKDSNTKKAGKTGPMKTLLVRVMTPDLRERLENLRKKPENIPQPISNTSRANLNKLLTDYTEMKKAILHVYWEEFQKDPVGLMSRVAQPASKKIDQNKLKPEMDEKGNLTTAGFACSQCGQPLFVYKLEQVSEKGKAYTNYFGRCNVAEHEKLILLAQLKPEKDSDEAVTYSLGKFGQRALDFYSIHVTKESTHPVKPLAQIAGNRYASGPVGKALSDACMGTIASFLSKYQDIIIEHQKVVKGNQKRLESLRELAGKENLEYPSVTLPPQPHTKEGVDAYNEVIARVRMWVNLNLWQKLKLSRDDAKPLLRLKGFPSFPLVERQANEVDWWDMVCNVKKLINEKKEDGKVFWQNLAGYKRQEALRPYLSSEEDRQKGKKFARYQLGDLLLHLEKKHGEDWGKVYDEAWERIDKKVEGLSKHIKLEEERRSEDAQSKAALTDWLRAKASFVIEGLKEADKDEFCRCELKLQKWYGDLRGKPFAIEAENSILDISGFSKQYNCAFIWQKDGVKKLNLYLIINYFKGGKLRFKKIKPEAFEANRFYTVINKKSGEIVPMEVNFNFDDPNLIILPLAFGKRQGREFIWNDLLSLETGSLKLANGRVIEKTLYNRRTRQDEPALFVALTFERREVLDSSNIKPMNLIGVDRGENIPAVIALTDPEGCPLSRFKDSLGNPTHILRIGESYKEKQRTIQAKKEVEQRRAGGYSRKYASKAKNLADDMVRNTARDLLYYAVTQDAMLIFENLSRGFGRQGKRTFMAERQYTRMEDWLTAKLAYEGLPSKTYLSKTLAQYTSKTCSNCGFTITSADYDRVLEKLKKTATGWMTTINGKELKVEGQITYYNRYKRQNVVKDLSVELDRLSEESVNNDISSWTKGRSGEALSLLKKRFSHRPVQEKFVCLNCGFETHADEQAALNIARSWLFLRSQEYKKYQTNKTTGNTDKRAFVETWQSFYRKKLKEVWKPAV

SEQ ID NO: 2373 - protein, 978 aa, synthetic construct
QEIKRLNKIRRRLVKDSNTKKAGKTGPMKTLLVRVMTPDLRERLENLRKKPENIPQPISNTSRANLNKLLTDYTEMKKAILHVYWEEFQKDPVGLMSRVAQPASKKIDQNKLKPEMDEKGNLTTAGFACSQCGQPLFVYKLEQVSEKGKAYTNYFGRCNVAEHEKLILLAQLKPEKDSDEAVTYSLGKFGQRALDFYSIHVTKESTHPVKPLAQIAGNRYASGPVGKALSDACMGTIASFLSKYQDIIIEHQKVVKGNQKRLESLRELAGKENLEYPSVTLPPQPHTKEGVDAYNEVIARVRMWVNLNLWQKLKLSRDDAKPLLRLKGFPSFPLVERQANEVDWWDMVCNVKKLINEKKEDGKVFWQNLAGYKRQEALRPYLSSEEDRKKGKKFARYQLGDLLLHLEKKHGEDWGKVYDEAWERIDKKVEGLSKHIKLEEERRSEDAQSKAALTDWLRAKASFVIEGLKEADKDEFCRCELKLQKWYGDLRGKPFAIEAENSILDISGFSKQYNCAFIWQKDGVKKLNLYLIINYFKGGKLRFKKIKPEAFEANRFYTVINKKSGEIVPMEVNFNFDDPNLIILPLAFGKRQGREFIWNDLLSLETGSLKLANGRVIEKTLYNRRTRQDEPALFVALTFERREVLDSSNIKPMNLIGVDRGENIPAVIALTDPEGCPLSRFKDSLGNPTHILRIGESYKEKQRTIQAKKEVEQRRAGGYSRKYASKAKNLADDMVRNTARDLLYYAVTQDAMLIFENLSRGFGRQGKRTFMAERQYTRMEDWLTAKLAYEGLPSKTYLSKTLAQYTSKTCSNCGFTITSADYDRVLEKLKKTATGWMTTINGKELKVEGQITYYNRYKRQNVVKDLSVELDRLSEESVNNDISSWTKGRSGEALSLLKKRFSHRPVQEKFVCLNCGFETHADEQAALNIARSWLFLRSQEYKKYQTNKTTGNTDKRAFVETWQSFYRKKLKEVWKPAV

SEQ ID NO: 2374 - protein, 978 aa, synthetic construct
QEIKRINKIRRRLVKDSNTKKAGKTGPMKTLLVRVMTPDLRERLENLRKKPENIPQPISNTSRANLNKLLTDYTEMKKAILHVYWEEFQKDPVGLMSRVAQPASKKIDQNKLKPEMDEKGNLTTAGFACSQCGQPLFVYKLEQVSEKGKAYTNYFGRCNVAEHEKLILLAQLKPEKDSDEAVTYSLGKFGQRALDFYSIHVTKESTHPVKPLAQIAGNRYASGPVGKALSDACMGTIASFLSKYQDIIIEHQKVVKGNQKRLESLRELAGKENLEYPSVTLPPQPHTKEGVDAYNEVIARVRMWVNLNLWQKLKLSRDDAKPLLRLKGFPSFPLVERQANEVDWWDMVCNVKKLINEKKEDGKVFWQNLAGYKRQEALRPYLSSEEDRKKGKKFARYQLGDLLLHLEKKHGEDWGKVYDEAWERIDKKVEGLSKHIKLEEERRSEDAQSKAALTDWLDAKASFVIEGLKEADKDEFCRCELKLQKWYGDLRGKPFAIEAENSILDISGFSKQYNCAFIWQKDGVKKLNLYLIINYFKGGKLRFKKIKPEAFEANRFYTVINKKSGEIVPMEVNFNFDDPNLIILPLAFGKRQGREFIWNDLLSLETGSLKLANGRVIEKTLYNRRTRQDEPALFVALTFERREVLDSSNIKPMNLIGVDRGENIPAVIALTDPEGCPLSRFKDSLGNPTHILRIGESYKEKQRTIQAKKEVEQRRAGGYSRKYASKAKNLADDMVRNTARDLLYYAVTQDAMLIFENLSRGFGRQGKRTFMAERQYTRMEDWLTAKLAYEGLPSKTYLSKTLAQYTSKTCSNCGFTITSADYDRVLEKLKKTATGWMTTINGKELKVEGQITYYNRYKRQNVVKDLSVELDRLSEESVNNDISSWTKGRSGEALSLLKKRFSHRPVQEKFVCLNCGFETHADEQAALNIARSWLFLRSQEYKKYQTNKTTGNTDKRAFVETWQSFYRKKLKEVWKPAV

SEQ ID NO: 2375 - protein, 976 aa, synthetic construct
QEIKRINKIRRRLVKDSNTKKAGKTGPMKTLLVRVMTPDLRERLENLRKKPENIPQPISNTSRANLNKLLTDYTEMKKAILHVYWEEFQKDPVGLMSRVAQPASKKIDQNKLKPEMDEKGNLTTAGFACSQCGQPLFVYKLEQVSEKGKAYTNYFGRCNVAEHEKLILLAQLKPEKDSDEAVTYSLGKFGQRALDFYSIHVTKESTHPVKPLAQIAGNRYASGPVGKALSDACMGTIASFLSKYQDIIIEHQKVVKGNQKRLESLRELAGKENLEYPSVTLPPQPHTKEGVDAYNEVIARVRMWVNLNLWQKLKLSRDDAKPLLRLKGFPSFPLVERQANEVDWWDMVCNVKKLINEKKEDGKVFWQNLAGYKRQEALRPYLSSEEDRKKGKKFARYQLGDLLLHLEKKHGEDWGKVYDEAWERIDKKVEGLSKHIKLEEERRSEDAQSKAALTDWLRAKASFVIEGLKEADKDEFCRCELKLQKWYGDLRGKPFAIEAENSDISGFSKQYNCAFIWQKDGVKKLNLYLIINYFKGGKLRFKKIKPEAFEANRFYTVINKKSGEIVPMEVNFNFDDPNLIILPLAFGKRQGREFIWNDLLSLETGSLKLANGRVIEKTLYNRRTRQDEPALFVALTFERREVLDSSNIKPMNLIGVDRGENIPAVIALTDPEGCPLSRFKDSLGNPTHILRIGESYKEKQRTIQAKKEVEQRRAGGYSRKYASKAKNLADDMVRNTARDLLYYAVTQDAMLIFENLSRGFGRQGKRTFMAERQYTRMEDWLTAKLAYEGLPSKTYLSKTLAQYTSKTCSNCGFTITSADYDRVLEKLKKTATGWMTTINGKELKVEGQITYYNRYKRQNVVKDLSVELDRLSEESVNNDISSWTKGRSGEALSLLKKRFSHRPVQEKFVCLNCGFETHADEQAALNIARSWLFLRSQEYKKYQTNKTTGNTDKRAFVETWQSFYRKKLKEVWKPAV

SEQ ID NO: 2376 - protein, 978 aa, synthetic construct
QEIKRINKIRRRLVKDSNTKKAGKTGPMKTLLVRVMTPDLRERLENLRKKPENIPQPISNTSRANLNKLLTDYTEMKKAILHVYWEEFQKDPVGLMSRVAQPASKKIDQNKLKPEMDEKGNLTTAGFACSQCGQPLFVYKLEQVSEKGKAYTNYVGRCNVAEHEKLILLAQLKPEKDSDEAVTYSLGKFGQRALDFYSIHVTKESTHPVKPLAQIAGNRYASGPVGKALSDACMGTIASFLSKYQDIIIEHQKVVKGNQKRLESLRELAGKENLEYPSVTLPPQPHTKEGVDAYNEVIARVRMWVNLNLWQKLKLSRDDAKPLLRLKGFPSFPLVERQANEVDWWDMVCNVKKLINEKKEDGKVFWQNLAGYKRQEALRPYLSSEEDRKKGKKFARYQLGDLLLHLEKKHGEDWGKVYDEAWERIDKKVEGLSKHIKLEEERRSEDAQSKAALTDWLRAKASFVIEGLKEADKDEFCRCELKLQKWYGDLRGKPFAIEAENSILDISGFSKQYNCAFIWQKDGVKKLNLYLIINYFKGGKLRFKKIKPEAFEANRFYTVINKKSGEIVPMEVNFNFDDPNLIILPLAFGKRQGREFIWNDLLSLETGSLKLANGRVIEKTLYNRRTRQDEPALFVALTFERREVLDSSNIKPMNLIGVDRGENIPAVIALTDPEGCPLSRFKDSLGNPTHILRIGESYKEKQRTIQAKKEVEQRRAGGYSRKYASKAKNLADDMVRNTARDLLYYAVTQDAMLIFENLSRGFGRQGKRTFMAERQYTRMEDWLTAKLAYEGLPSKTYLSKTLAQYTSKTCSNCGFTITSADYDRVLEKLKKTATGWMTTINGKELKVEGQITYYNRYKRQNVVKDLSVELDRLSEESVNNDISSWTKGRSGEALSLLKKRFSHRPVQEKFVCLNCGFETHADEQAALNIARSWLFLRSQEYKKYQTNKTTGNTDKRAFVETWQSFYRKKLKEVWKPAV

SEQ ID NO: 2377 - protein, 979 aa, synthetic construct
QEIKRINKIRRRLVKDSNTKKAGKTGPMKTLLVRVMTPDLRERLENLRKKPENIPQPISNTSRANLNKLLTDYTEMKKAILHVYWEEFQKDPVGLMSRVAQPASKKIDQNKLKPEMDEKGNLTTAGFACSQCGQPLFVYKLEQVSEKGKAYTNYFGRCNVAEHEKLILLAQLKPEKDSDEAVTYSLGKFGQRALDFYSIHVTKESTHPVKPLAQIAGNRYASGPVGKALSDACMGTIASFLSKYQDIIIEHQKVVKGNQKRLESLRELAGKENLEYPSVTLPPQPHTKEGVDAYNEVIARVRMWVNLNLWQKLKLSRDDAKPLLRLKGFPSFPLVERQANEVDWWDMVCNVKKLINGEKKEDGKVFWQNLAGYKRQEALRPYLSSEEDRKKGKKFARYQLGDLLLHLEKKHGEDWGKVYDEAWERIDKKVEGLSKHIKLEEERRSEDAQSKAALTDWLRAKASFVIEGLKEADKDEFCRCELKLQKWYGDLRGKPFAIEAENSILDISGFSKQYNCAFIWQKDGVKKLNLYLIINYFKGGKLRFKKIKPEAFEANRFYTVINKKSGEIVPMEVNFNFDDPNLIILPLAFGKRQGREFIWNDLLSLETGSLKLANGRVIEKTLYNRRTRQDEPALFVALTFERREVLDSSNIKPMNLIGVDRGENIPAVIALTDPEGCPLSRFKDSLGNPTHILRIGESYKEKQRTIQAKKEVEQRRAGGYSRKYASKAKNLADDMVRNTARDLLYYAVTQDAMLIFENLSRGFGRQGKRTFMAERQYTRMEDWLTAKLAYEGLPSKTYLSKTLAQYTSKTCSNCGFTITSADYDRVLEKLKKTATGWMTTINGKELKVEGQITYYNRYKRQNVVKDLSVELDRLSEESVNNDISSWTKGRSGEALSLLKKRFSHRPVQEKFVCLNCGFETHADEQAALNIARSWLFLRSQEYKKYQTNKTTGNTDKRAFVETWQSFYRKKLKEVWKPAV

SEQ ID NO: 2378 - protein, 978 aa, synthetic construct
QEIKRINKIRRRLVKDSNTKKAGKTGPMKTLLVRVMTPDLRERLENLRKKPENIPQPISNTSRANLNKLLTDYTEMKKAILHVYWEEFQKDPVGLMSRVAQPASKKIDQNKLKPEMDEKGNLTTAGFACSQCGQPLFVYKLEQVSEKGKAYTNYFGRCNVAEHEKLILLAQLKPEKDSDEAVTYSLGKFGQRALDFYSIHVTKESTHPVKPLAQIAGNRFASGPVGKALSDACMGTIASFLSKYQDIIIEHQKVVKGNQKRLESLRELAGKENLEYPSVTLPPQPHTKEGVDAYNEVIARVRMWVNLNLWQKLKLSRDDAKPLLRLKGFPSFPLVERQANEVDWWDMVCNVKKLINEKKEDGKVFWQNLAGYKRQEALRPYLSSEEDRKKGKKFARYQLGDLLLHLEKKHGEDWGKVYDEAWERIDKKVEGLSKHIKLEEERRSEDAQSKAALTDWLRAKASFVIEGLKEADKDEFCRCELKLQKWYGDLRGKPFAIEAENSILDISGFSKQYNCAFIWQKDGVKKLNLYLIINYFKGGKLRFKKIKPEAFEANRFYTVINKKSGEIVPMEVNFNFDDPNLIILPLAFGKRQGREFIWNDLLSLETGSLKLANGRVIEKTLYNRRTRQDEPALFVALTFERREVLDSSNIKPMNLIGVDRGENIPAVIALTDPEGCPLSRFKDSLGNPTHILRIGESYKEKQRTIQAKKEVEQRRAGGYSRKYASKAKNLADDMVRNTARDLLYYAVTQDAMLIFENLSRGFGRQGKRTFMAERQYTRMEDWLTAKLAYEGLPSKTYLSKTLAQYTSKTCSNCGFTITSADYDRVLEKLKKTATGWMTTINGKELKVEGQITYYNRYKRQNVVKDLSVELDRLSEESVNNDISSWTKGRSGEALSLLKKRFSHRPVQEKFVCLNCGFETHADEQAALNIARSWLFLRSQEYKKYQTNKTTGNTDKRAFVETWQSFYRKKLKEVWKPAV

SEQ ID NO: 2379 - protein, 978 aa, synthetic construct
QEIKRINKIRRRLVKDSNTKKAGKTGPMKTLLVRVMTPDLRERLENLRKKPENIPQPISNTSRANLNKLLTDYTEMKKAILHVYWEEFQKDPVGLMSRVAQPASKKIDQNKLKPEMDEKGNLTTAGFACSQCGQPLFVYKLEQVSEKGKAYTNYFGRCNVAEHEKLILLAQLKPEKDSDEAVTYSLGKFGQRALDFYSIHVTKESTHPVKPLAQIAGNRYASGPVGKALSDACMGTIASFLSKYQDIIIEHQKVVKGNQKRLESLRELAGKENLEYPSVTLPPQPHTKEGVDAYNEVIARVRMWVNLNLWQKLKLSRDDAKPLLRLKGFPSFPLVERQANEVDWWDMVCNVKKLINEKKEDGKVFWQNLAGYKRQEALRPYLSSEEDRKKGKKFARYQLGDLLLHLEKKHGEDWGKVYDEAWERIDKKVEGLSKHIKLEEERRSEDAQSKAALTDWLRAKASFVIEGLKEADKDEFCRCELKLQKWYGDLRGKPFAIEAENSILDISGFSKQYNCAFIWQKDGVKKLNLYLIINYFKGGKLRFKKIKPEAFEANRFYTVINKKSGEIVPMEVNFNFDDPNLIILPLAFGKRQGREFIWNDLLSLETGSLKLANGRVIEKTLYNRRTRQDEPALFVALTFERREVLDSSNIKPMNLIGVDRGENIPAVIALTDPEGCPLSRFKDSLGNPTHILRIGESYKEKQRTIQAKKEVEQRRAGGYSRKYASKAKNLADDMVRNTARDLLYYAVTQDAMLIFENLSRGFGRQGKRTFMAERQYTRMEDWYTAKLAYEGLPSKTYLSKTLAQYTSKTCSNCGFTITSADYDRVLEKLKKTATGWMTTINGKELKVEGQITYYNRYKRQNVVKDLSVELDRLSEESVNNDISSWTKGRSGEALSLLKKRFSHRPVQEKFVCLNCGFETHADEQAALNIARSWLFLRSQEYKKYQTNKTTGNTDKRAFVETWQSFYRKKLKEVWKPAV

SEQ ID NO: 2380 - protein, 979 aa, synthetic construct
QEIKRINKIRRRLVKDSNTKKAGKTGPMKTLLVRVMTPDLRERLENLRKKPENIPQPISNTSRANLNKLLTDYTEMKKAILHVYWEEFQKDPVGLMSRVAQPASKKIDQNKLKPEMDEKGNLTTAGFACSQCGQPLFVYKLEQVSEKGKAYTNYFGRCNVAEHEKLILLAQLKPEKDSDEAVTYSLGKFGQRALDFYSIHVTKESTHPVKPLAQIAGNRYASGPVGKALSDACMGTIASFLSKYQDIIIEHQKVVKGNQKRLESLRELAGKENLEYPSVTLPPQPHTKEGVDAYNEVIARVRMWVNLNLWQKLKLSRDDAKPLLRLKGFPSFPLVERQANEVDWWDMVPCNVKKLINEKKEDGKVFWQNLAGYKRQEALRPYLSSEEDRKKGKKFARYQLGDLLLHLEKKHGEDWGKVYDEAWERIDKKVEGLSKHIKLEEERRSEDAQSKAALTDWLRAKASFVIEGLKEADKDEFCRCELKLQKWYGDLRGKPFAIEAENSILDISGFSKQYNCAFIWQKDGVKKLNLYLIINYFKGGKLRFKKIKPEAFEANRFYTVINKKSGEIVPMEVNFNFDDPNLIILPLAFGKRQGREFIWNDLLSLETGSLKLANGRVIEKTLYNRRTRQDEPALFVALTFERREVLDSSNIKPMNLIGVDRGENIPAVIALTDPEGCPLSRFKDSLGNPTHILRIGESYKEKQRTIQAKKEVEQRRAGGYSRKYASKAKNLADDMVRNTARDLLYYAVTQDAMLIFENLSRGFGRQGKRTFMAERQYTRMEDWLTAKLAYEGLPSKTYLSKTLAQYTSKTCSNCGFTITSADYDRVLEKLKKTATGWMTTINGKELKVEGQITYYNRYKRQNVVKDLSVELDRLSEESVNNDISSWTKGRSGEALSLLKKRFSHRPVQEKFVCLNCGFETHADEQAALNIARSWLFLRSQEYKKYQTNKTTGNTDKRAFVETWQSFYRKKLKEVWKPAV

SEQ ID NO: 2381 - protein, 979 aa, synthetic construct
QEIKRINKIRRRLVKDSNTKKAGKTGPMKTLLVRVMTPDLRERLENLRKKPENIPQPISNTSRANLNKLLTDYTEMKKAILHVYWEEFQKDPVGLMSRVAQPASKKIDQNKLKPEMDEKGNLTTAGFACSQCGQPLFVYKLEQVSEKGKAYTNYFGRCNVAEHEKLILLAQLKPEKDSDEAVTYSLGKFGQRALDFYSIHVTKESTHPVKPLAQTIAGNRYASGPVGKALSDACMGTIASFLSKYQDIIIEHQKVVKGNQKRLESLRELAGKENLEYPSVTLPPQPHTKEGVDAYNEVIARVRMWVNLNLWQKLKLSRDDAKPLLRLKGFPSFPLVERQANEVDWWDMVCNVKKLINEKKEDGKVFWQNLAGYKRQEALRPYLSSEEDRKKGKKFARYQLGDLLLHLEKKHGEDWGKVYDEAWERIDKKVEGLSKHIKLEEERRSEDAQSKAALTDWLRAKASFVIEGLKEADKDEFCRCELKLQKWYGDLRGKPFAIEAENSILDISGFSKQYNCAFIWQKDGVKKLNLYLIINYFKGGKLRFKKIKPEAFEANRFYTVINKKSGEIVPMEVNFNFDDPNLIILPLAFGKRQGREFIWNDLLSLETGSLKLANGRVIEKTLYNRRTRQDEPALFVALTFERREVLDSSNIKPMNLIGVDRGENIPAVIALTDPEGCPLSRFKDSLGNPTHILRIGESYKEKQRTIQAKKEVEQRRAGGYSRKYASKAKNLADDMVRNTARDLLYYAVTQDAMLIFENLSRGFGRQGKRTFMAERQYTRMEDWLTAKLAYEGLPSKTYLSKTLAQYTSKTCSNCGFTITSADYDRVLEKLKKTATGWMTTINGKELKVEGQITYYNRYKRQNVVKDLSVELDRLSEESVNNDISSWTKGRSGEALSLLKKRFSHRPVQEKFVCLNCGFETHADEQAALNIARSWLFLRSQEYKKYQTNKTTGNTDKRAFVETWQSFYRKKLKEVWKPAV

SEQ ID NO: 2382 - protein, 978 aa, synthetic construct
QEIKRINKIRRRLVKDSNTKKAGKTGPMKTLLVRVMTPDLRERLENLRKKPENIPQPISNTSRANLNKLLTDYTEMKKAILHVYWEEFQKDPVGLMSRVAQPASKKIDQNKLKPEMDEKGNLTTAGFACSQCGQPLFVYKLEQVSEKGKAYTNYFGRCNVAEHEKLILLAQLKPEKDSDEAVTYSLGKFGQRALDFYSIHVTKESTHPVKPLAQIAGNRYASGPVGKALSDACMGTIASFLSKYQDIIIEHQKVVKGNQKRLESLRELAGKENLEYPSVTLPPQPHTKEGVDAYNEVIARVRMWVNLNLWQKLKLSRDDAKPLLRLKGFPSFPLVERQANEVDWWDMVCNVKKLINEKKEDGKVFWQNLAGYKRQEALRPYLSSEEDRKKGKKFARYQLGDLLLHLEKKHGEDWGKVYDEAWERIDKKVEGLSKHIKLEEERRSEDAQSKAALTDWLRAKASFVIEGLKEADKDEFCRCELKLQKWYGDLRGKPFAIEAENSILDISGFSKQYNCAFIWQKDGVKKLNLYLIINYFKGGKLRFKKIKPEAFEANRFYTVINKKSGEIVPMEVNFNFDDPNLIILPLAFGKRQGREFIWNDLLSLETGSLKLANGRVIEKTLYNRRTRQDEPALFVALTFERREVLDSSNIKPMNLIGVDRGENIPAVIALTDPEGCPLSRFKDSLGNPTHILRIGESYKEKQRTIQAKKEVEQRRAGGYSRKYASKAKNLADDMVRNTARDLLYYAVTQDAMLIFENLSRGFGRQGKRTFMAERQYTRMEDWLTAKLAYEGLPSKTYLSKTLAQYTSKTCSNCGFTITSADYDRVLEKLKKTATGWMTTINGKELKVEGQITYYNRYKRQNVVKDLSVELDRLSEESVNNDISSWTKGRSGEALSLLKKRFSHRPCQEKFVCLNCGFETHADEQAALNIARSWLFLRSQEYKKYQTNKTTGNTDKRAFVETWQSFYRKKLKEVWKPAV

SEQ ID NO: 2383 - protein, 979 aa, synthetic construct
QEIKRINKIRRRLVKDSNTKKAGKTGPMKTLLVRVMTPDLRERLENLPRKKPENIPQPISNTSRANLNKLLTDYTEMKKAILHVYWEEFQKDPVGLMSRVAQPASKKIDQNKLKPEMDEKGNLTTAGFACSQCGQPLFVYKLEQVSEKGKAYTNYFGRCNVAEHEKLILLAQLKPEKDSDEAVTYSLGKFGQRALDFYSIHVTKESTHPVKPLAQIAGNRYASGPVGKALSDACMGTIASFLSKYQDIIIEHQKVVKGNQKRLESLRELAGKENLEYPSVTLPPQPHTKEGVDAYNEVIARVRMWVNLNLWQKLKLSRDDAKPLLRLKGFPSFPLVERQANEVDWWDMVCNVKKLINEKKEDGKVFWQNLAGYKRQEALRPYLSSEEDRKKGKKFARYQLGDLLLHLEKKHGEDWGKVYDEAWERIDKKVEGLSKHIKLEEERRSEDAQSKAALTDWLRAKASFVIEGLKEADKDEFCRCELKLQKWYGDLRGKPFAIEAENSILDISGFSKQYNCAFIWQKDGVKKLNLYLIINYFKGGKLRFKKIKPEAFEANRFYTVINKKSGEIVPMEVNFNFDDPNLIILPLAFGKRQGREFIWNDLLSLETGSLKLANGRVIEKTLYNRRTRQDEPALFVALTFERREVLDSSNIKPMNLIGVDRGENIPAVIALTDPEGCPLSRFKDSLGNPTHILRIGESYKEKQRTIQAKKEVEQRRAGGYSRKYASKAKNLADDMVRNTARDLLYYAVTQDAMLIFENLSRGFGRQGKRTFMAERQYTRMEDWLTAKLAYEGLPSKTYLSKTLAQYTSKTCSNCGFTITSADYDRVLEKLKKTATGWMTTINGKELKVEGQITYYNRYKRQNVVKDLSVELDRLSEESVNNDISSWTKGRSGEALSLLKKRFSHRPVQEKFVCLNCGFETHADEQAALNIARSWLFLRSQEYKKYQTNKTTGNTDKRAFVETWQSFYRKKLKEVWKPAV

SEQ ID NO: 2384 - protein, 978 aa, synthetic construct
QEIKRINKIRRRLVKDSNTKKAGKTGPMKTLLVRVMTPDLRERLENLRKKPENIPQPISNTSRANLNKLLTDYTEMKKAILHVYWEEFQKDPVGLMSRVAQPASKKIDQNKLKPEMDEKGNLTTAGFACSQCGQPLFVYKLEQVSEKGKAYTNYFGRCNVAEHEKLILLAQLKPEKDSDEAVTYSLGKFGQRALDFYSIHVTKESTHPVKPLAQIAGNRYASGPVGKALSDACMGTIASFLSKYQDIIIEHQKVVKGNQKRLESLRELAGKENLEYPSVTLPPQPHTKEGVDAYNEVIARVRMWVNLNLWQKLKLSRDDAKPLLRLKGFPSFPLVERQANEVDWWDMVCNVKKLINEKKEDGKVFWQNLAGYKRQEALRPYLSSEEDRKKGKKFARYQLGDLLLHLEKKHGEDWGKVYDEAWERIDKKVEGLSKHIKLEEERRSEDAQSKAALTDWLRAKASFVIEGLKEADKDEFCRCELKLQKWYGDLRGKPFAIEAENSILDISGFSKQYNCAFIWQKDGVKKLNLYLIINYFKGGKLRFKKIKPEAFEANRFYTVINKKSGEIVPMEVNFNFDDPNLIILPLAFGKRQGREFIWNDLLSLETGSLKLANGRVIEKTLYNRRTRQDEPALFVALTFERREVLDSSNIKPMNLIGVDRGENIPAVIALTDPEGCPLSRFKDSLGNPTHILRIGESYKEKQRTIQAKKEVEQRRAGGYSRKYASKAKNLADDMVRNTARDLLYYAVTQDAMLIFENLSRGFGRQGKRTFMAERQYTRMEDWLTAKLAYEGLPSKTYLSKTLAQYTSKTCSNCGFTITSADYDRVLEGLKKTATGWMTTINGKELKVEGQITYYNRYKRQNVVKDLSVELDRLSEESVNNDISSWTKGRSGEALSLLKKRFSHRPVQEKFVCLNCGFETHADEQAALNIARSWLFLRSQEYKKYQTNKTTGNTDKRAFVETWQSFYRKKLKEVWKPAV

SEQ ID NO: 2385 - protein, 977 aa, synthetic construct
QEIKRINKIRRRLVKDSNTKKAGKTGPMKTLLVRVMTPDLRERLENLRKKPENIPQPISNTSRANLNKLLTDYTEMKKAILHVYWEEFQKDPVGLMSRVAQPASKKIDQNKLKPEMDEKGNLTTAGFACSQCGQPLFVYKLEQVSEKGKAYTNYFGRCNVAEHEKLILLAQLKPEKDSDEAVTYSLGKFGQRALDFYSIHVTKESTHPVKPLAQIAGNRYASGPVGKALSDACMGTIASFLSKYQDIIIEHQKVVKGNQKRLESLRELAGKENLEYPSVTLPPQPHTKEGVDAYNEVIARVRMWVNLNLWQKLKLSRDDAKPLLRLKGFPSFPLVERQANEVDWWDMVCNVKKLINEKKEDGKVFWQNLAGYKRQEALRPYLSSEEDRKKGKKFARYQLGDLLLHLEKKHGEDWGKVYDEAWERIDKKVEGLSKHIKLEEERRSEDAQSKAALTDWLRAKASFVIEGLKEADKDEFCRCELKLQKWYGDLRGKPFAIEAENSILDISGFSKQYNCAFIWQKDGVKKLNLYLIINYFKGGKLRFKKIKPEAFEANRFYTVINKKSGEIVPMEVNFNFDDPNLIILPLAFGKRQGREFIWNDLLSLETGSLKLANGRVIEKTLYNRRTRQDEPALFVALTFERREVLDSSNIKPMNLIGVDRGENIPAVIALTDPEGCPLSRFKDSLGNPTHILRIGESYKEKQRTIQAKKEVEQRRAGGYSRKYASKAKNLADDMVRNTARDLLYYAVTQDAMLIFENLSRGFGRQGKRTFMAERQYTRMEDWLTAKLAYEGLPSKTYLSKTLAQTSKTCSNCGFTITSADYDRVLEKLKKTATGWMTTINGKELKVEGQITYYNRYKRQNVVKDLSVELDRLSEESVNNDISSWTKGRSGEALSLLKKRFSHRPVQEKFVCLNCGFETHADEQAALNIARSWLFLRSQEYKKYQTNKTTGNTDKRAFVETWQSFYRKKLKEVWKPAV

SEQ ID NO: 2386 - protein, 979 aa, synthetic construct
QEIKRINKIRRRLVKDSNTKKAGKTGPMKTLLVRVMTPDLRERLENLRKKPENIPQPISNTSRANLNKLLTDYTEMKKAILHVYWEEFQKDPVGLMSRVAQPASKKIDQNKLKPEMDEKGNLTTAGFACSQCGQPLFVYKLEQVSEKGKAYTNYFGRCNVAEHEKLILLAQLKPEKDSDEAVTYSLGKFGQRALDFYSIHVTKESTHPVKPLAQIAGNRYASGPVGKALSDACMGTIASFLSKYQDIIIEHQKVVKGNQKRLESLRELAGKENLEYPSVTLPPQPHTKEGVDAYNEVIARVRMWVNLNLWQKLKLSRDDAKPLLRLKGFPSFPLVERQANEVDWWDMVCNVKKLINEKKEDGKVFWQNLAGYKRQEALRPYLSSEEDRKKGKKFARYQLGDLLLHLEKKHGEDWGKVYDEAWERIDKKVEGLSKHIKLEEERRSEDAQSKAALTDWLRAKASFVIEGLKEADKDEFCRCELKLQKWYGDLRGKPFAIEAENSILDISGFSKQYNCAFIWQKDGVKKLNLYLIINYFKGGKLRFKKIKPEAFEANRFYTVINKKSGEIVPMEVNFNFDDPNLIILPLAFGKRQGREFIWNDLLSLETGSLKLANGRVIEKTLYNRRTRQDEPALFVALTFERREVLDSSNIKPMNLIGVDRGENIPAVIALTDPEGCPLSRFKDSLGNPTHILRIGESYKEKQRTIQAKKEVEQRRAGGYSRKYASKAKNLADDMVRNTARDLLYYAVTQDAMLIFENLSRGFGRQGKRTFMAERQYTRMEDWLTAKLAYEGLPSKTYLSKTLAQYTISKTCSNCGFTITSADYDRVLEKLKKTATGWMTTINGKELKVEGQITYYNRYKRQNVVKDLSVELDRLSEESVNNDISSWTKGRSGEALSLLKKRFSHRPVQEKFVCLNCGFETHADEQAALNIARSWLFLRSQEYKKYQTNKTTGNTDKRAFVETWQSFYRKKLKEVWKPAV

SEQ ID NO: 2387 - protein, 978 aa, synthetic construct
QEIKRINKIRRRLVKDSNTKKAGKTGPMKTLLVRVMTPDLRERLENLRKKPENIPQPISNTSRANLNKLLTDYTEMKKAILHVYWEEFQKDPVGLMSRVAQPASKKIDQNKLKPEMDEKGNLTTAGFACSQCGQPLFVYKLEQVSEKGKAYTNYFGRCNVAEHEKLILLAQLKPEKDSDEAVTYSLGKFGQRALDFYSIHVTKESTHPVKPLAQIAGNRYASGPVGKALSDACMGTIASFLSKYQDIIIEHQKVVKGNQKRLESLRELAGKENLEYPSVTLPPQPHTKEGVDAYNEVIARVRMWVNLNLWQKLKLSRDDAKPLLRLKGFPSFPLVERQANEVDWWDMVCNVKKLINEKKEDGKVFWQNLAGYKRQEALRPYLSSEEDRKKGKKFARYQLGDLLLHLEKKHGEDWGKVYDEAWERIDKKVEGLSKHIKLEEERRSEDAQSKAALTDWLRAKASFVIEGLKEADKDEFCRCELKLQKWYGDLRGKPFAIEAENSILDISGFSKQYNCAFIWQKDGVKKLNLYLIINYFKGGKLRFKKIKPEAFEANRFYTVINKKSGEIVPMEVNFNFDDPNLIILPLAFGKRQGREFIWNDLLSLETGSLKLANGRVIEKTLYNRRTRQDEPALFVALTFERREVLDSSNIKPMNLIGVDRGENIPAVIALTDPEGCPLSRFKDSLGNPTHILRIGESYKEKQRTIQAKKEVEQRRAGGYSRKYASKAKNLADDMVRNTARDLLYYAVTQDAMLIFENLSRGFGRQGKRTFMAERQYTRMEDWLTAKLAYEGLPSKTYLSKTLAQYTSKTKSNCGFTITSADYDRVLEKLKKTATGWMTTINGKELKVEGQITYYNRYKRQNVVKDLSVELDRLSEESVNNDISSWTKGRSGEALSLLKKRFSHRPVQEKFVCLNCGFETHADEQAALNIARSWLFLRSQEYKKYQTNKTTGNTDKRAFVETWQSFYRKKLKEVWKPAV

SEQ ID NO: 2388 - protein, 978 aa, synthetic construct
QEIKRINKIRRRLVKDSNTKKAGKTGPMKTLLVRVMTPDLRERLENLRKKPENIPQPISNTSRANLNKLLTDYTEMKKAILHVYWEEFQKDPVGLMSRVAQPASKKIDQNKLKPEMDEKGNLTTAGFACSQCGQPLFVYKLEQVSEKGKAYTNYFGRCNVAEHEKLILLAQLKPEKDSDEAVTYSLGKFGQRALDFYSIHVTKESTHPVKPLAQIAGNRYASGPVGKALSDACMGTIASFLSKYQDIIIEHQKVVKGNQKRLESLRELAGKENLEYPSVTLPPQPHTKEGVDAYNEVIARVRMWVNLNLWQKLKLSRDDAKPLLRLKGFPSFPLVERQANEVDWWDMVCNVKKLINEKKEDGKVFWQNLAGYKRQEALRPYLSSEEDRKKGKKFARYQLGDLLLHLEKKHGEDWGKVYDEAWERIDKKVEGLSKHIKLEEERRSEDAQSKAALTDWLRAKASFVIEGLKEADKDEFCRCELKLQKWYGDLRGKPFAIEAENSILDISGFSKQYNCAFIWQKDGVKKLNLYLIINYFKGGKLRFKKIKPEAFEANRFYTVINKKSGEIVPMEVNFNFDDPNLIILPLAFGKRQGREFIWNDLLSLETGSLKLANGRVIEKTLYNRRTRQDEPALFVALTFERREVLDSSNIKPMNLIGVDRGENIPAVIALTDPEGCPLSRFKDSLGNPTHILRIGESYKEKQRTIQAKKEVEQRRAGGYSRKYASKAKNLADDMVRNTARDLLYYAVTQDAMLIFENLSRGFGRQGKRTFMAERQYTRMEDWLTAKLAYEGLPSKTYLSKQLAQYTSKTCSNCGFTITSADYDRVLEKLKKTATGWMTTINGKELKVEGQITYYNRYKRQNVVKDLSVELDRLSEESVNNDISSWTKGRSGEALSLLKKRFSHRPVQEKFVCLNCGFETHADEQAALNIARSWLFLRSQEYKKYQTNKTTGNTDKRAFVETWQSFYRKKLKEVWKPAV

SEQ ID NO: 2389 - protein, 978 aa, synthetic construct
QEIKRINKIRRRLVKDSNTKKAGKTGPMKTLLVRVMTPDLRERLENLRKKPENIPQPISNTSRANLNKLLTDYTEMKKAILHVYWEEFQKDPVGLMSRVAQPASKKIDQNKLKPEMDEKGNLTTAGFACSQCGQPLFVYKLEQVSEKGKAYTNYFGRCNVAEHEKLILLAQLKPEKDSDEAVTYSLGKFGQRALDFYSIHVTKESTHPVKPLAQIAGNRYASGPVGKALSDACMGTIASFLSKYQDIIIEHQKVVKGNQKRLESLRELAGKENLEYPSVTLPPQPHTKEGVDAYNEVIARVRMWVNLNLWQKLKLSRDDAKPLLRLKGFPSFPLVERQANEVDWWDMVCNVKKLINEKKEDGKVFWQNLAGYKRQEALRPYLSSEEDRKKGKKFARYQLGDLLLHLEKKHGEDWGKVYDEAWERIDKKVEGLSKHIKLEEERRSEDAQSKAALTDWLRAKASFVIEGLKEADKDEFCRCELKLQKWYGDLRGKPFAIEAENSILDISGFSKQYNCAFIWQKDGVKKLNLYLIINYFKGGKLRFKKIKPEAFEANRFYTVINKKSGEIVPMEVNFNFDDPNLIILPLAFGKRQGREFIWNDLLSLETGSLKLANGRVIEKTLYNRRTRQDEPALFVALTFERREVLDSSNIKPMNLIGVDRGENIPAVIALTDPEGCPLSRFKDSLGNPTHILRIGESYKEKQRTIQAKKEVEQRRAGGYSRKYASKAKNLADDMVRNTARDLLYYAVTQDAMLIFENLSRGFGRQGKRTFMAERQYTRMEDWLTAKLAYEGLPSKTYLSKTLAQYYSKTCSNCGFTITSADYDRVLEKLKKTATGWMTTINGKELKVEGQITYYNRYKRQNVVKDLSVELDRLSEESVNNDISSWTKGRSGEALSLLKKRFSHRPVQEKFVCLNCGFETHADEQAALNIARSWLFLRSQEYKKYQTNKTTGNTDKRAFVETWQSFYRKKLKEVWKPAV

SEQ ID NO: 2390 - protein, 978 aa, synthetic construct
QEIKRINKIRRRLVKDSNTKKAGKTGPMKTLLVRVMTPDLRERLENLRKKPENIPQPISNTSRANLNKLLTDYTEMKKAILHVYWEEFQKDPVGLMSRVAQPASKKIDQNKLKPEMDEKGNLTTAGFACSQCGQPLFVYKLEQVSEKGKAYTNYFGRCNVAEHEKLILLAQLKPEKDSDEAVTYSLGKFGQRALDFYSIHVTKESTHPVKPLAQIAGNRYASGPVGKALSDACMGTIASFLSKYQDIIIEHQKVVKGNQKRLESLRELAGKENLEYPSVTLPPQPHTKEGVDAYNEVIARVRMWVNLNLWQKLKLSRDDAKPLLRLKGFPSFPLVERQANEVDWWDMVCNVKKLINEKKEDGKVFWQNLAGYKRQEALRPYLSSEEDRKKGKKFARYQLGDLLLHLEKKHGEDWGKVYDEAWERIDKKVEGLSKHIKLEEERRSEDAQSKAALTDWLRAKASFVIEGLKEADKDEFCRCELKLQKWYGDLRGKPFAIEAENSILDISGFSKQYNCAFIWQKDGVKKLNLYLIINYFKGGKLRFKKIKPEAFEANRFYTVINKKSGEIVPMEVNFNFDDPNLIILPLAFGKRQGREFIWNDLLSLETGSLKLANGRVIEKTLYNRRTRQDEPALFVALTFERREVLDSSNIKPMNLIGVDRGENIPAVIALTDPEGCPLSRFKDSLGNPTHILRIGESYKEKQRTIQAKKEVEQRRAGGYSRKYASKAKNLADDMVRNTARDLLYYAVTQDAMLIFENLSRGFGRQGKRTFMAERQYTRMEDWLTAKLAYEGLPSKTYLSKTLAKYTSKTCSNCGFTITSADYDRVLEKLKKTATGWMTTINGKELKVEGQITYYNRYKRQNVVKDLSVELDRLSEESVNNDISSWTKGRSGEALSLLKKRFSHRPVQEKFVCLNCGFETHADEQAALNIARSWLFLRSQEYKKYQTNKTTGNTDKRAFVETWQSFYRKKLKEVWKPAV

SEQ ID NO: 2391 - protein, 978 aa, synthetic construct
QEIKRINKIRRRLVKDSNTKKAGKTGPMKTLLVRVMTPDLRERLENLRKKPENIPQPISNTSRANLNKLLTDYTEMKKAILHVYWEEFQKDPVGLMSRVAQPASKKIDQNKLKPEMDEKGNLTTAGFACSQCGQPLFVYKLEQVSEKGKAYTNYFGRCNVAEHEKLILLAQLKPEKDSDEAVTYSLGKFGQRALDFYSIHVTKESTHPVKPLAQIAGNRYASGPVGKALSDACMGTIASFLSKYQDIIIEHQKVVKGNQKRLESLRELAGKENLEYPSVTLPPQPHTKEGVDAYNEVIARVRMWVNLNLWQKLKLSRDDAKPLLRLKGFPSFPLVERQANEVDWWDMVCNVKKLINEKKEDGKVFWQNLAGYKRQEALRPYLSSEEDRKKGKKFARYQLGDLLLHLEKKHGEDWGKVYDEAWERIDKKVEGLSKHIKLEEERRSEDAQSKAALTDWLRAKASFVIEGLKEADKDEFCRCELKLQKWYGDLRGKPFAIEAENSILDISGFSKQYNCAFIWQKDGVKKLNLYLIINYFKGGKLRFKKIKPEAFEANRFYTVINKKSGEIVPMEVNFNFDDPNLIILPLAFGKRQGREFIWNDLLSLETGSLKLANGRVIEKTLYNRRTRQDEPALFVALTFERREVLDSSNIKPMNLIGVDRGENIPAVIALTDPEGCPLSRFKDSLGNPTHILRIGESYKEKQRTIQAKKEVEQRRAGGYSRKYASKAKNLADDMVRNTARDLLYYAVTQDAMLIFENLSRGFGRQGKRTFMAERQYTRMEDWLTAKLAYEGLASKTYLSKTLAQYTSKTCSNCGFTITSADYDRVLEKLKKTATGWMTTINGKELKVEGQITYYNRYKRQNVVKDLSVELDRLSEESVNNDISSWTKGRSGEALSLLKKRFSHRPVQEKFVCLNCGFETHADEQAALNIARSWLFLRSQEYKKYQTNKTTGNTDKRAFVETWQSFYRKKLKEVWKPAV

SEQ ID NO: 2392 - protein, 979 aa, synthetic construct
QEIKRINKIRRRLVKDSNTKKAGKTGPMKTLLVRVMTPDLRERLENLRKKPENIPQPISNTSRANLNKLLTDYTEMKKAILHVYWEEFQKDPVGLMSRVAQPASKKIDQNKLKPEMDEKGNLTTAGFACSQCGQPLFVYKLEQVSEKGKAYTNYFGRCNVAEHEKLILLAQLKPEKDSDEAVTYSLGKFGQRALDFYSIHVTKESTHPVKPLAQIAGNRYASGPVGKALSDACMGTIASFLSKYQDIIIEHQKVVKGNQKRLESLRELAGKENLEYPSVTLPPQPHTKEGVDAYNEVIARVRMWVNLNLWQKLKLSRDDAKPLLRLKGFPSFPLVERQANEVDWWDMVCNVKKLINEKKEDGKVFWQNLAGYKRQEALRPYLSSEEDRKKGKKFARYQLGDLLLHLEKKHGEDWGKVYDEAWERIDKKVEGLSKHIKLEEERRSEDAQSKAALTDWLRAKASFVIEGLKEADKDEFCRCELKLQKWYGDLRGKPFAIEAENSILDISGFSKQYNCAFIWQKDGVKKLNLYLIINYFKGGKLRFKKIKPEAFEANRFYTVINKKSGEIVPMEVNFNFDDPNLIILPLAFGKRQGREFIWNDLLSLETGSLKLANGRVIEKTLYNRRTRQDEPALFVALTFERREVLDSSNIKPMNLIGVDRGENIPAVIALTDPEGCPLSRFKDSLGNPTHILRIGESYKEKQRTIQAKKEVEQRRAGGYSRKYASKAKNLADDMVRNTARDLLYYAVTQDAMLIFENLSRGFGRQGKRTFMAERQYTRMEDWLTAKLAYEGLPSKTYLSKTLLAQYTSKTCSNCGFTITSADYDRVLEKLKKTATGWMTTINGKELKVEGQITYYNRYKRQNVVKDLSVELDRLSEESVNNDISSWTKGRSGEALSLLKKRFSHRPVQEKFVCLNCGFETHADEQAALNIARSWLFLRSQEYKKYQTNKTTGNTDKRAFVETWQSFYRKKLKEVWKPAV

SEQ ID NO: 2393 - protein, 977 aa, synthetic construct
QEIKRINKIRRRLVKDSNTKKAGKTGPMKTLLVRVMTPDLRERLENLRKKPENIPQPISNTSRANLNKLLTDYTEMKKAILHVYWEEFQKDPVGLMSRVAQPASKKIDQNKLKPEMDEKGNLTTAGFACSQCGQPLFVYKLEQVSEKGKAYTNYFGRCNVAEHEKLILLAQLKPEKDSDEAVTYSLGKFGQRALDFYSIHVTKESTHPVKPLAQIAGNRYASGPVGKALSDACMGTIASFLSKYQDIIIEHQKVVKGNQKRLESLRELAGKENLEYPSVTLPPQPHTKEGVDAYNEVIARVRMWVNLNLWQKLKLSRDDAKPLLRLKGFPSFPLVERQANEVDWWDMVCNVKKLINEKKEDGKVFWQNLAGYKRQEALRPYLSSEEDRKKGKKFARYQLGDLLLHLEKKHGEDWGKVYDEAWERIDKKVEGLSKHIKLEEERRSEDAQSKAALTDWLRAKASFVIEGLKEADKDEFCRCELKLQKWYGDLRGKPFAIEAENSILDISGFSKQYNCAFIWQKDGVKKLNLYLIINYFKGGKLRFKKIKPEAFEANRFYTVINKKSGEIVPMEVNFNFDDPNLIILPLAFGKRQGREFIWNDLLSLETGSLKLANGRVIEKTLYNRRTRQDEPALFVALTFERREVLDSSNIKPMNLIGVDRGENIPAVIALTDPEGCPLSRFKDSLGNPTHILRIGESYKEKQRTIQAKKEVEQRRAGGYSRKYASKAKNLADDMVRNTARDLLYYAVTQDAMLIFENLSRGFGRQGKRTFMAERQYTRMEDWLTAKLAYEGLPSKTYLSKTAQYTSKTCSNCGFTITSADYDRVLEKLKKTATGWMTTINGKELKVEGQITYYNRYKRQNVVKDLSVELDRLSEESVNNDISSWTKGRSGEALSLLKKRFSHRPVQEKFVCLNCGFETHADEQAALNIARSWLFLRSQEYKKYQTNKTTGNTDKRAFVETWQSFYRKKLKEVWKPAV

SEQ ID NO: 2394 - protein, 979 aa, synthetic construct
QEIKRINKIRRRLVKDSNTKKAGKTGPMKTLLVRVMTPDLRERLENLRKKPENIPQPISNTSRANLNKLLTDYTEMKKAILHVYWEEFQKDPVGLMSRVAQPASKKIDQNKLKPEMDEKGNLTTAGFACSQCGQPLFVYKLEQVSEKGKAYTNYFGRCNVAEHEKLILLAQLKPEKDSDEAVTYSLGKFGQRALDFYSIHVTKESTHPVKPLAQIAGNRYASGPVGKALSDACMGTIASFLSKYQDIIIEHQKVVKGNQKRLESLRELAGKENLEYPSVTLPPQPHTKEGVDAYNEVIARVRMWVNLNLWQKLKLSRDDAKPLLRLKGFPSFPLVERQANEVDWWDMVCNVKKLINEKKEDGKVFWQNLAGYKRQEALRPYLSSEEDRKKGKKFARYQLGDLLLHLEKKHGEDWGKVYDEAWERIDKKVEGLSKHIKLEEERRSEDAQSKAALTDWLRAKASFVIEGLKEADKDEFCRCELKLQKWYGDLRGKPFAIEAENSILDISGFSKQYNCAFIWQKDGVKKLNLYLIINYFKGGKLRFKKIKPEAFEANRFYTVINKKSGEIVPMEVNFNFDDPNLIILPLAFGKRQGREFIWNDLLSLETGSLKLANGRVIEKTLYNRRTRQDEPALFVALTFERREVLDSSNIKPMNLIGVDRGENIPAVIALTDPEGCPLSRFKDSLGNPTHILRIGESYKEKQRTIQAKKEVEQRRAGGYSRKYASKAKNLADDMVRNTARDLLYYAVTQDAMLIFENLSRGFGRQGKRTFMAERQYTRMEDWLTAKLAYEGLPSKTYLSKTLAQYTSKTCSNCGFTWITSADYDRVLEKLKKTATGWMTTINGKELKVEGQITYYNRYKRQNVVKDLSVELDRLSEESVNNDISSWTKGRSGEALSLLKKRFSHRPVQEKFVCLNCGFETHADEQAALNIARSWLFLRSQEYKKYQTNKTTGNTDKRAFVETWQSFYRKKLKEVWKPAV

SEQ ID NO: 2395 - protein, 979 aa, synthetic construct
QEIKRINKIRRRLVKDSNTKKAGKTGPMKTLLVRVMTPDLRERLENLRKKPENIPQPISNTSRANLNKLLTDYTEMKKAILHVYWEEFQKDPVGLMSRVAQPASKKIDQNKLKPEMDEKGNLTTAGFACSQCGQPLFVYKLEQVSEKGKAYTNYFGRCNVAEHEKLILLAQLKPEKDSDEAVTYSLGKFGQRALDFYSIHVTKESTHPVKPLAQIAGNRYASGPVGKALSDACMGTIASFLSKYQDIIIEHQKVVKGNQKRLESLRELAGKENLEYPSVTLPPQPHTKEGVDAYNEVIARVRMWVNLNLWQKLKLSRDDAKPLLRLKGFPSFPLVERQANEVDWWDMVCNVKKLINEKKEDGKVFWQNLAGYKRQEALRPYLSSEEDRKKGKKFARYQLGDLLLHLEKKHGEDWGKVYDEAWERIDKKVEGLSKHIKLEEERRSEDAQSKAALTDWLRAKASFVIEGLKEADKDEFCRCELKLQKWYGDLRGKPFAIEAENSILDISGFSKQYNCAFIWQKDGVKKLNLYLIINYFKGGKLRFKKIKPEAFEANRFYTVINKKSGEIVPMEVNFNFDDPNLIILPLAFGKRQGREFIWNDLLSLETGSLKLANGRVIEKTLYNRRTRQDEPALFVALTFERREVLDSSNIKPMNLIGVDRGENIPAVIALTDPEGCPLSRFKDSLGNPTHILRIGESYKEKQRTIQAKKEVEQRRAGGYSRKYASKAKNLADDMVRNTARDLLYYAVTQDAMLIFENLSRGFGRQGKRTFMAERQYTRMEDWLTAKLAYEGLPSKTYLSKHTLAQYTSKTCSNCGFTITSADYDRVLEKLKKTATGWMTTINGKELKVEGQITYYNRYKRQNVVKDLSVELDRLSEESVNNDISSWTKGRSGEALSLLKKRFSHRPVQEKFVCLNCGFETHADEQAALNIARSWLFLRSQEYKKYQTNKTTGNTDKRAFVETWQSFYRKKLKEVWKPAV

SEQ ID NO: 2396 - protein, 978 aa, synthetic construct
QEIKRINKIRRRLVKDSNTKKAGKTGPMKTLLVRVMTPDLRERLENLRKKPENIPQPISNTSRANLNKLLTDYTEMKKAILHVYWEEFQKDPVGLMSRVAQPASKKIDQNKLKPEMDEKGNLTTAGFACSQCGQPLFVYKLEQVSEKGKAYTNYFGRCNVAEHEKLILLAQLKPEKDSDEAVTYSLGKFGQRALDFYSIHVTKESTHPVKPLAQIAGNRYASGPVGKALSDACMGTIASFLSKYQDIIIEHQKVVKGNQKRLESLRELAGKENLEYPSVTLPPQPHTKEGVDAYNEVIARVRMWVNLNLWQKLKLSRDDAKPLLRLKGFPSFPLVERQANEVDWWDMVCNVKKLINEKKEDGKVFWQNLAGYKRQEALRPYLSSEEDRKKGKKFARYQLGDLLLHLEKKHGEDWGKVYDEAWERIDKKVEGLSKHIKLEEERRSEDAQSKAALTDWLRAKASFVIEGLKEADKDEFCRCELKLQKWYGDLRGKPFAIEAENSILDISGFSKQYNCAFIWQKDGVKKLNLYLIINYFKGGKLRFKKIKPEAFEANRFYTVINKKSGEIVPMEVNFNFDDPNLIILPLAFGKRQGREFIWNDLLSLETGSLKLANGRVIEKTLYNRRTRQDEPALFVALTFERREVLDSSNIKPMNLIGVDRGENIPAVIALTDPEGCPLSRFKDSLGNPTHILRIGESYKEKQRTIQAKKEVEQRRAGGYSRKYASKAKNLADDMVRNTARDLLYYAVTQDAMLIFENLSRGFGRQGKRTFMAERQYTRMEDWLTAKLAYEGLPSKTYLSKTLAQYTSKPCSNCGFTITSADYDRVLEKLKKTATGWMTTINGKELKVEGQITYYNRYKRQNVVKDLSVELDRLSEESVNNDISSWTKGRSGEALSLLKKRFSHRPVQEKFVCLNCGFETHADEQAALNIARSWLFLRSQEYKKYQTNKTTGNTDKRAFVETWQSFYRKKLKEVWKPAV

SEQ ID NO: 2397 - protein, 979 aa, synthetic construct
QEIKRINKIRRRLVKDSNTKKAGKTGPMKTLLVRVMTPDLRERLENLRKKPENIPQPISNTSRANLNKLLTDYTEMKKAILHVYWEEFQKDPVGLMSRVAQPASKKIDQNKLKPEMDEKGNLTTAGFACSQCGQPLFVYKLEQVSEKGKAYTNYFGRCNVAEHEKLILLAQLKPEKDSDEAVTYSLGKFGQRALDFYSIHVTKESTHPVKPLAQIAGNRYASGPVGKALSDACMGTIASFLSKYQDIIIEHQKVVKGNQKRLESLRELAGKENLEYPSVTLPPQPHTKEGVDAYNEVIARVRMWVNLNLWQKLKLSRDDAKPLLRLKGFPSFPLVERQANEVDWWDMVCNVKKLINEKKEDGKVFWQNLAGYKRQEALRPYLSSEEDRKKGKKFARYQLGDLLLHLEKKHGEDWGKVYDEAWERIDKKVEGLSKHIKLEEERRSEDAQSKAALTDWLRAKASFVIEGLKEADKDEFCRCELKLQKWYGDLRGKPFAIEAENSILDISGFSKQYNCAFIWQKDGVKKLNLYLIINYFKGGKLRFKKIKPEAFEANRFYTVINKKSGEIVPMEVNFNFDDPNLIILPLAFGKRQGREFIWNDLLSLETGSLKLANGRVIEKTLYNRRTRQDEPALFVALTFERREVLDSSNIKPMNLIGVDRGENIPAVIALTDPEGCPLSRFKDSLGNPTHILRIGESYKEKQRTIQAKKEVEQRRAGGYSRKYASKAKNLADDMVRNTARDLLYYAVTQDAMLIFENLSRGFGRQGKRTFMAERQYTRMEDWLTAKLAYEGLPSKTYLSKTLAAQYTSKTCSNCGFTITSADYDRVLEKLKKTATGWMTTINGKELKVEGQITYYNRYKRQNVVKDLSVELDRLSEESVNNDISSWTKGRSGEALSLLKKRFSHRPVQEKFVCLNCGFETHADEQAALNIARSWLFLRSQEYKKYQTNKTTGNTDKRAFVETWQSFYRKKLKEVWKPAV

SEQ ID NO: 2398 - protein, 979 aa, synthetic construct
QEIKRINKIRRRLVKDSNTKKAGKTGPMKTLLVRVMTPDLRERLENLRKKPENIPQPISNTSRANLNKLLTDYTEMKKAILHVYWEEFQKDPVGLMSRVAQPASKKIDQNKLKPEMDEKGNLTTAGFACSQCGQPLFVYKLEQVSEKGKAYTNYFGRCNVAEHEKLILLAQLKPEKDSDEAVTYSLGKFGQRALDFYSIHVTKESTHPVKPLAQIAGNRYASGPVGKALSDACMGTIASFLSKYQDIIIEHQKVVKGNQKRLESLRELAGKENLEYPSVTLPPQPHTKEGVDAYNEVIARVRMWVNLNLWQKLKLSRDDAKPLLRLKGFPSFPLVERQANEVDWWDMVCNVKKLINEKKEDGKVFWQNLAGYKRQEALRPYLSSEEDRKKGKKFARYQLGDLLLHLEKKHGEDWGKVYDEAWERIDKKVEGLSKHIKLEEERRSEDAQSKAALTDWLRAKASFVIEGLKEADKDEFCRCELKLQKWYGDLRGKPFAIEAENSILDISGFSKQYNCAFIWQKDGVKKLNLYLIINYFKGGKLRFKKIKPEAFEANRFYTVINKKSGEIVPMEVNFNFDDPNLIILPLAFGKRQGREFIWNDLLSLETGSLKLANGRVIEKTLYNRRTRQDEPALFVALTFERREVLDSSNIKPMNLIGVDRGENIPAVIALTDPEGCPLSRFKDSLGNPTHILRIGESYKEKQRTIQAKKEVEQRRAGGYSRKYASKAKNLADDMVRNTARDLLYYAVTQDAMLIFENLSRGFGRQGKRTFMAERQYTRMEDWLTAKLAYEGLPSKTYLSKTLAQYTSKTCSNCGGFTITSADYDRVLEKLKKTATGWMTTINGKELKVEGQITYYNRYKRQNVVKDLSVELDRLSEESVNNDISSWTKGRSGEALSLLKKRFSHRPVQEKFVCLNCGFETHADEQAALNIARSWLFLRSQEYKKYQTNKTTGNTDKRAFVETWQSFYRKKLKEVWKPAV

SEQ ID NO: 2399 - protein, 979 aa, synthetic construct
QEIKRINKIRRRLVKDSNTKKAGKTGPMKTLLVRVMTPDLRERLENLRKKPENIPQPISNTSRANLNKLLTDYTEMKKAILHVYWEEFQKDPVGLMSRVAQPASKKIDQNKLKPEMDEKGNLTTAGFACSQCGQPLFVYKLEQVSEKGKAYTNYFGRCNVAEHEKLILLAQLKPEKDSDEAVTYSLGKFGQRALDFYSIHVTKESTHPVKPLAQIAGNRYASGPVGKALSDACMGTIASFLSKYQDIIIEHQKVVKGNQKRLESLRELAGKENLEYPSVTLPPQPHTKEGVDAYNEVIARVRMWVNLNLWQKLKLSRDDAKPLLRLKGFPSFPLVERQANEVDWWDMVCNVKKLINEKKEDGKVFWQNLAGYKRQEALRPYLSSEEDRKKGKKFARYQLGDLLLHLEKKHGEDWGKVYDEAWERIDKKVEGLSKHIKLEEERRSEDAQSKAALTDWLRAKASFVIEGLKEADKDEFCRCELKLQKWYGDLRGKPFAIEAENSILDISGFSKQYNCAFIWQKDGVKKLNLYLIINYFKGGKLRFKKIKPEAFEANRFYTVINKKSGEIVPMEVNFNFDDPNLIILPLAFGKRQGREFIWNDLLSLETGSLKLANGRVIEKTLYNRRTRQDEPALFVALTFERREVLDSSNIKPMNLIGVDRGENIPAVIALTDPEGCPLSRFKDSLGNPTHILRIGESYKEKQRTIQAKKEVEQRRAGGYSRKYASKAKNLADDMVRNTARDLLYYAVTQDAMLIFENLSRGFGRQGKRTFMAERQYTRMEDWLTAKLAYEGLPSKTYLSKTLFAQYTSKTCSNCGFTITSADYDRVLEKLKKTATGWMTTINGKELKVEGQITYYNRYKRQNVVKDLSVELDRLSEESVNNDISSWTKGRSGEALSLLKKRFSHRPVQEKFVCLNCGFETHADEQAALNIARSWLFLRSQEYKKYQTNKTTGNTDKRAFVETWQSFYRKKLKEVWKPAV

SEQ ID NO: 2400 - protein, 979 aa, synthetic construct
QEIKRINKIRRRLVKDSNTKKAGKTGPMKTLLVRVMTPDLRERLENLRKKPENIPQPISNTSRANLNKLLTDYTEMKKAILHVYWEEFQKDPVGLMSRVAQPASKKIDQNKLKPEMDEKGNLTTAGFACSQCGQPLFVYKLEQVSEKGKAYTNYFGRCNVAEHEKLILLAQLKPEKDSDEAVTYSLGKFGQRALDFYSIHVTKESTHPVKPLAQIAGNRYASGPVGKALSDACMGTIASFLSKYQDIIIEHQKVVKGNQKRLESLRELAGKENLEYPSVTLPPQPHTKEGVDAYNEVIARVRMWVNLNLWQKLKLSRDDAKPLLRLKGFPSFPLVERQANEVDWWDMVCNVKKLINEKKEDGKVFWQNLAGYKRQEALRPYLSSEEDRKKGKKFARYQLGDLLLHLEKKHGEDWGKVYDEAWERIDKKVEGLSKHIKLEEERRSEDAQSKAALTDWLRAKASFVIEGLKEADKDEFCRCELKLQKWYGDLRGKPFAIEAENSILDISGFSKQYNCAFIWQKDGVKKLNLYLIINYFKGGKLRFKKIKPEAFEANRFYTVINKKSGEIVPMEVNFNFDDPNLIILPLAFGKRQGREFIWNDLLSLETGSLKLANGRVIEKTLYNRRTRQDEPALFVALTFERREVLDSSNIKPMNLIGVDRGENIPAVIALTDPEGCPLSRFKDSLGNPTHILRIGESYKEKQRTIQAKKEVEQRRAGGYSRKYASKAKNLADDMVRNTARDLLYYAVTQDAMLIFENLSRGFGRQGKRTFMAERQYTRMEDWLTAKLAYEGLPSKTYLSKTLAQYTSKNTCSNCGFTITSADYDRVLEKLKKTATGWMTTINGKELKVEGQITYYNRYKRQNVVKDLSVELDRLSEESVNNDISSWTKGRSGEALSLLKKRFSHRPVQEKFVCLNCGFETHADEQAALNIARSWLFLRSQEYKKYQTNKTTGNTDKRAFVETWQSFYRKKLKEVWKPAV

SEQ ID NO: 2401 - protein, 978 aa, synthetic construct
QEIKRINKIRRRLVKDSNTKKAGKTGPMKTLLVRVMTPDLRERLENLRKKPENIPQPISNTSRANLNKLLTDYTEMKKAILHVYWEEFQKDPVGLMSRVAQPASKKIDQNKLKPEMDEKGNLTTAGFACSQCGQPLFVYKLEQVSEKGKAYTNYFGRCNVAEHEKLILLAQLKPEKDSDEAVTYSLGKFGQRALDFYSIHVTKESTHPVKPLAQIAGNRYASGPVGKALSDACMGTIASFLSKYQDIIIEHQKVVKGNQKRLESLRELAGKENLEYPSVTLPPQPHTKEGVDAYNEVIARVRMWVNLNLWQKLKLSRDDAKPLLRLKGFPSFPLVERQANEVDWWDMVCNVKKLINEKKEDGKVFWQNLAGYKRQEALRPYLSSEEDRKKGKKFARYQLGDLLLHLEKKHGEDWGKVYDEAWERIDKKVEGLSKHIKLEEERRSEDAQSKAALTDWLRAKASFVIEGLKEADKDEFCRCELKLQKWYGDLRGKPFAIEAENSILDISGFSKQYNCAFIWQKDGVKKLNLYLIINYFKGGKLRFKKIKPEAFEANRFYTVINKKSGEIVPMEVNFNFDDPNLIILPLAFGKRQGREFIWNDLLSLETGSLKLANGRVIEKTLYNRRTRQDEPALFVALTFERREVLDSSNIKPMNLIGVDRGENIPAVIALTDPEGCPLSRFKDSLGNPTHILRIGESYKEKQRTIQAKKEVEQRRAGGYSRKYASKAKNLADDMVRNTARDLLYYAVTQDAMLIFENLSRGFGRQGKRTFMAERQYTRMEDWLTAKLAYEGLPSKTYLSKTLAQYTSKTCSNCGPTITSADYDRVLEKLKKTATGWMTTINGKELKVEGQITYYNRYKRQNVVKDLSVELDRLSEESVNNDISSWTKGRSGEALSLLKKRFSHRPVQEKFVCLNCGFETHADEQAALNIARSWLFLRSQEYKKYQTNKTTGNTDKRAFVETWQSFYRKKLKEVWKPAV

SEQ ID NO: 2402 - protein, 979 aa, synthetic construct
QEIKRINKIRRRLVKDSNTKKAGKTGPMKTLLVRVMTPDLRERLENLRKKPENIPQPISNTSRANLNKLLTDYTEMKKAILHVYWEEFQKDPVGLMSRVAQPASKKIDQNKLKPEMDEKGNLTTAGFACSQCGQPLFVYKLEQVSEKGKAYTNYFGRCNVAEHEKLILLAQLKPEKDSDEAVTYSLGKFGQRALDFYSIHVTKESTHPVKPLAQIAGNRYASGPVGKALSDACMGTIASFLSKYQDIIIEHQKVVKGNQKRLESLRELAGKENLEYPSVTLPPQPHTKEGVDAYNEVIARVRMWVNLNLWQKLKLSRDDAKPLLRLKGFPSFPLVERQANEVDWWDMVCNVKKLINEKKEDGKVFWQNLAGYKRQEALRPYLSSEEDRKKGKKFARYQLGDLLLHLEKKHGEDWGKVYDEAWERIDKKVEGLSKHIKLEEERRSEDAQSKAALTDWLRAKASFVIEGLKEADKDEFCRCELKLQKWYGDLRGKPFAIEAENSILDISGFSKQYNCAFIWQKDGVKKLNLYLIINYFKGGKLRFKKIKPEAFEANRFYTVINKKSGEIVPMEVNFNFDDPNLIILPLAFGKRQGREFIWNDLLSLETGSLKLANGRVIEKTLYNRRTRQDEPALFVALTFERREVLDSSNIKPMNLIGVDRGENIPAVIALTDPEGCPLSRFKDSLGNPTHILRIGESYKEKQRTIQAKKEVEQRRAGGYSRKYASKAKNLADDMVRNTARDLLYYAVTQDAMLIFENLSRGFGRQGKRTFMAERQYTRMEDWLTAKLAYEGLPSKTYLSKTWLAQYTSKTCSNCGFTITSADYDRVLEKLKKTATGWMTTINGKELKVEGQITYYNRYKRQNVVKDLSVELDRLSEESVNNDISSWTKGRSGEALSLLKKRFSHRPVQEKFVCLNCGFETHADEQAALNIARSWLFLRSQEYKKYQTNKTTGNTDKRAFVETWQSFYRKKLKEVWKPAV

SEQ ID NO: 2403 - protein, 978 aa, synthetic construct
QEIKRINKIRRRLVKDSNTKKAGKTGPMKTLLVRVMTPDLRERLENLRKKPENIPQPISNTSRANLNKLLTDYTEMKKAILHVYWEEFQKDPVGLMSRVAQPASKKIDQNKLKPEMDEKGNLTTAGFACSQCGQPLFVYKLEQVSEKGKAYTNYFGRCNVAEHEKLILLAQLKPEKDSDEAVTYSLGKFGQRALDFYSIHVTKESTHPVKPLAQIAGNRYASGPVGKALSDACMGTIASFLSKYQDIIIEHQKVVKGNQKRLESLRELAGKENLEYPSVTLPPQPHTKEGVDAYNEVIARVRMWVNLNLWQKLKLSRDDAKPLLRLKGFPSFPLVERQANEVDWWDMVCNVKKLINEKKEDGKVFWQNLAGYKRQEALRPYLSSEEDRKKGKKFARYQLGDLLLHLEKKHGEDWGKVYDEAWERIDKKVEGLSKHIKLEEERRSEDAQSKAALTDWLRAKASFVIEGLKEADKDEFCRCELKLQKWYGDLRGKPFAIEAENSILDISGFSKQYNCAFIWQKDGVKKLNLYLIINYFKGGKLRFKKIKPEAFEANRFYTVINKKSGEIVPMEVNFNFDDPNLIILPLAFGKRQGREFIWNDLLSLETGSLKLANGRVIEKTLYNRRTRQDEPALFVALTFERREVLDSSNIKPMNLIGVDRGENIPAVIALTDPEGCPLSRFKDSLGNPTHILRIGESYKEKQRTIQAKKEVEQRRAGGYSRKYASKAKNLADDMVRNTARDLLYYAVTQDAMLIFENLSRGFGRQGKRTFMAERQYTRMEDWLTAKLAYEGLPSKTYLSKTLAQYTSKTMSNCGFTITSADYDRVLEKLKKTATGWMTTINGKELKVEGQITYYNRYKRQNVVKDLSVELDRLSEESVNNDISSWTKGRSGEALSLLKKRFSHRPVQEKFVCLNCGFETHADEQAALNIARSWLFLRSQEYKKYQTNKTTGNTDKRAFVETWQSFYRKKLKEVWKPAV

SEQ ID NO: 2404 - protein, 977 aa, synthetic construct
QEIKRINKIRRRLVKDSNTKKAGKTGPMKTLLVRVMTPDLRERLENLRKKPENIPQPISNTSRANLNKLLTDYTEMKKAILHVYWEEFQKDPVGLMSRVAQPASKKIDQNKLKPEMDEKGNLTTAGFACSQCGQPLFVYKLEQVSEKGKAYTNYFGRCNVAEHEKLILLAQLKPEKDSDEAVTYSLGKFGQRALDFYSIHVTKESTHPVKPLAQIAGNRYASGPVGKALSDACMGTIASFLSKYQDIIIEHQKVVKGNQKRLESLRELAGKENLEYPSVTLPPQPHTKEGVDAYNEVIARVRMWVNLNLWQKLKLSRDDAKPLLRLKGFPSFPLVERQANEVDWWDMVCNVKKLINEKKEDGKVFWQNLAGYKRQEALRPYLSSEEDRKKGKKFARYQLGDLLLHLEKKHGEDWGKVYDEAWERIDKKVEGLSKHIKLEEERRSEDAQSKAALTDWLRAKASFVIEGLKEADKDEFCRCELKLQKWYGDLRGKPFAIEAENSILDISGFSKQYNCAFIWQKDGVKKLNLYLIINYFKGGKLRFKKIKPEAFEANRFYTVINKKSGEIVPMEVNFNFDDPNLIILPLAFGKRQGREFIWNDLLSLETGSLKLANGRVIEKTLYNRRTRQDEPALFVALTFERREVLDSSNIKPMNLIGVDRGENIPAVIALTDPEGCPLSRFKDSLGNPTHILRIGESYKEKQRTIQAKKEVEQRRAGGYSRKYASKAKNLADDMVRNTARDLLYYAVTQDAMLIFENLSRGFGRQGKRTFMAERQYTRMEDWLTAKLAYEGLPSKTYLSKTLAQYTSKTCSCGFTITSADYDRVLEKLKKTATGWMTTINGKELKVEGQITYYNRYKRQNVVKDLSVELDRLSEESVNNDISSWTKGRSGEALSLLKKRFSHRPVQEKFVCLNCGFETHADEQAALNIARSWLFLRSQEYKKYQTNKTTGNTDKRAFVETWQSFYRKKLKEVWKPAV

SEQ ID NO: 2405 - protein, 979 aa, synthetic construct
QEIKRINKIRRRLVKDSNTKKAGKTGPMKTLLVRVMTPDLRERLENLRKKPENIPQPISNTSRANLNKLLTDYTEMKKAILHVYWEEFQKDPVGLMSRVAQPASKKIDQNKLKPEMDEKGNLTTAGFACSQCGQPLFVYKLEQVSEKGKAYTNYFGRCNVAEHEKLILLAQLKPEKDSDEAVTYSLGKFGQRALDFYSIHVTKESTHPVKPLAQIAGNRYASGPVGKALSDACMGTIASFLSKYQDIIIEHQKVVKGNQKRLESLRELAGKENLEYPSVTLPPQPHTKEGVDAYNEVIARVRMWVNLNLWQKLKLSRDDAKPLLRLKGFPSFPLVERQANEVDWWDMVCNVKKLINEKKEDGKVFWQNLAGYKRQEALRPYLSSEEDRKKGKKFARYQLGDLLLHLEKKHGEDWGKVYDEAWERIDKKVEGLSKHIKLEEERRSEDAQSKAALTDWLRAKASFVIEGLKEADKDEFCRCELKLQKWYGDLRGKPFAIEAENSILDISGFSKQYNCAFIWQKDGVKKLNLYLIINYFKGGKLRFKKIKPEAFEANRFYTVINKKSGEIVPMEVNFNFDDPNLIILPLAFGKRQGREFIWNDLLSLETGSLKLANGRVIEKTLYNRRTRQDEPALFVALTFERREVLDSSNIKPMNLIGVDRGENIPAVIALTDPEGCPLSRFKDSLGNPTHILRIGESYKEKQRTIQAKKEVEQRRAGGYSRKYASKAKNLADDMVRNTARDLLYYAVTQDAMLIFENLSRGFGRQGKRTFMAERQYTRMEDWLTAKLAYEGLPSKTYLSKTLAQYTSKTCSVNCGFTITSADYDRVLEKLKKTATGWMTTINGKELKVEGQITYYNRYKRQNVVKDLSVELDRLSEESVNNDISSWTKGRSGEALSLLKKRFSHRPVQEKFVCLNCGFETHADEQAALNIARSWLFLRSQEYKKYQTNKTTGNTDKRAFVETWQSFYRKKLKEVWKPAV

SEQ ID NO: 2406 - protein, 978 aa, synthetic construct
QEIKRINKIRRRLVKDSNTKKAGKTGPMKTLLVRVMTPDLRERLENLRKKPENIPQPISNTSRANLNKLLTDYTEMKKAILHVYWEEFQKDPVGLMSRVAQPASKKIDQNKLKPEMDEKGNLTTAGFACSQCGQPLFVYKLEQVSEKGKAYTNYFGRCNVAEHEKLILLAQLKPEKDSDEAVTYSLGKFGQRALDFYSIHVTKESTHPVKPLAQIAGNRYASGPVGKALSDACMGTIASFLSKYQDIIIEHQKVVKGNQKRLESLRELAGKENLEYPSVTLPPQPHTKEGVDAYNEVIARVRMWVNLNLWQKLKLSRDDAKPLLRLKGFPSFPLVERQANEVDWWDMVCNVKKLINEKKEDGKVFWQNLAGYKRQEALRPYLSSEEDRKKGKKFARYQLGDLLLHLEKKHGEDWGKVYDEAWERIDKKVEGLSKHIKLEEERRSEDAQSKAALTDWLRAKASFVIEGLKEADKDEFCRCELKLQKWYGDLRGKPFAIEAENSILDISGFSKQYNCAFIWQKDGVKKLNLYLIINYFKGGKLRFKKIKPEAFEANRFYTVINKKSGEIVPMEVNFNFDDPNLIILPLAFGKRQGREFIWNDLLSLETGSLKLANGRVIEKTLYNRRTRQDEPALFVALTFERREVLDSSNIKPMNLIGVDRGENIPAVIALTDPEGCPLSRFKDSLGNPTHILRIGESYKEKQRTIQAKKEVEQRRAGGYSRKYASKAKNLADDMVRNTARDLLYYAVTQDAMLIFENLSRGFGRQGKRTFMAERQYTRMEDWLTAKLAYEGLPSKTYLSKTLAQYTPKTCSNCGFTITSADYDRVLEKLKKTATGWMTTINGKELKVEGQITYYNRYKRQNVVKDLSVELDRLSEESVNNDISSWTKGRSGEALSLLKKRFSHRPVQEKFVCLNCGFETHADEQAALNIARSWLFLRSQEYKKYQTNKTTGNTDKRAFVETWQSFYRKKLKEVWKPAV

SEQ ID NO: 2407 - protein, 979 aa, synthetic construct
QEIKRINKIRRRLVKDSNTKKAGKTGPMKTLLVRVMTPDLRERLENLRKKPENIPQPISNTSRANLNKLLTDYTEMKKAILHVYWEEFQKDPVGLMSRVAQPASKKIDQNKLKPEMDEKGNLTTAGFACSQCGQPLFVYKLEQVSEKGKAYTNYFGRCNVAEHEKLILLAQLKPEKDSDEAVTYSLGKFGQRALDFYSIHVTKESTHPVKPLAQIAGNRYASGPVGKALSDACMGTIASFLSKYQDIIIEHQKVVKGNQKRLESLRELAGKENLEYPSVTLPPQPHTKEGVDAYNEVIARVRMWVNLNLWQKLKLSRDDAKPLLRLKGFPSFPLVERQANEVDWWDMVCNVKKLINEKKEDGKVFWQNLAGYKRQEALRPYLSSEEDRKKGKKFARYQLGDLLLHLEKKHGEDWGKVYDEAWERIDKKVEGLSKHIKLEEERRSEDAQSKAALTDWLRAKASFVIEGLKEADKDEFCRCELKLQKWYGDLRGKPFAIEAENSILDISGFSKQYNCAFIWQKDGVKKLNLYLIINYFKGGKLRFKKIKPEAFEANRFYTVINKKSGEIVPMEVNFNFDDPNLIILPLAFGKRQGREFIWNDLLSLETGSLKLANGRVIEKTLYNRRTRQDEPALFVALTFERREVLDSSNIKPMNLIGVDRGENIPAVIALTDPEGCPLSRFKDSLGNPTHILRIGESYKEKQRTIQAKKEVEQRRAGGYSRKYASKAKNLADDMVRNTARDLLYYAVTQDAMLIFENLSRGFGRQGKRTFMAERQYTRMEDWPLTAKLAYEGLPSKTYLSKTLAQYTSKTCSNCGFTITSADYDRVLEKLKKTATGWMTTINGKELKVEGQITYYNRYKRQNVVKDLSVELDRLSEESVNNDISSWTKGRSGEALSLLKKRFSHRPVQEKFVCLNCGFETHADEQAALNIARSWLFLRSQEYKKYQTNKTTGNTDKRAFVETWQSFYRKKLKEVWKPAV

SEQ ID NO: 2408 - protein, 979 aa, synthetic construct
QEIKRINKIRRRLVKDSNTKKAGKTGPMKTLLVRVMTPDLRERLENLRKKPENIPQPISNTSRANLNKLLTDYTEMKKAILHVYWEEFQKDPVGLMSRVAQPASKKIDQNKLKPEMDEKGNLTTAGFACSQCGQPLFVYKLEQVSEKGKAYTNYFGRCNVAEHEKLILLAQLKPEKDSDEAVTYSLGKFGQRALDFYSIHVTKESTHPVKPLAQIAGNRYASGPVGKALSDACMGTIASFLSKYQDIIIEHQKVVKGNQKRLESLRELAGKENLEYPSVTLPPQPHTKEGVDAYNEVIARVRMWVNLNLWQKLKLSRDDAKPLLRLKGFPSFPLVERQANEVDWWDMVCNVKKLINEKKEDGKVFWQNLAGYKRQEALRPYLSSEEDRKKGKKFARYQLGDLLLHLEKKHGEDWGKVYDEAWERIDKKVEGLSKHIKLEEERRSEDAQSKAALTDWLRAKASFVIEGLKEADKDEFCRCELKLQKWYGDLRGKPFAIEAENSILDISGFSKQYNCAFIWQKDGVKKLNLYLIINYFKGGKLRFKKIKPEAFEANRFYTVINKKSGEIVPMEVNFNFDDPNLIILPLAFGKRQGREFIWNDLLSLETGSLKLANGRVIEKTLYNRRTRQDEPALFVALTFERREVLDSSNIKPMNLIGVDRGENIPAVIALTDPEGCPLSRFKDSLGNPTHILRIGESYKEKQRTIQAKKEVEQRRAGGYSRKYASKAKNLADDMVRNTARDLLYYAVTQDAMLIFENLSRGFGRQGKRTFMAERQYTRMEDWLTAKLAYEGLPSKTYLSKTLAQYTSKTCMSNCGFTITSADYDRVLEKLKKTATGWMTTINGKELKVEGQITYYNRYKRQNVVKDLSVELDRLSEESVNNDISSWTKGRSGEALSLLKKRFSHRPVQEKFVCLNCGFETHADEQAALNIARSWLFLRSQEYKKYQTNKTTGNTDKRAFVETWQSFYRKKLKEVWKPAV

SEQ ID NO: 2409 - protein, 979 aa, synthetic construct
QEIKRINKIRRRLVKDSNTKKAGKTGPMKTLLVRVMTPDLRERLENLRKKPENIPQPISNTSRANLNKLLTDYTEMKKAILHVYWEEFQKDPVGLMSRVAQPASKKIDQNKLKPEMDEKGNLTTAGFACSQCGQPLFVYKLEQVSEKGKAYTNYFGRCNVAEHEKLILLAQLKPEKDSDEAVTYSLGKFGQRALDFYSIHVTKESTHPVKPLAQIAGNRYASGPVGKALSDACMGTIASFLSKYQDIIIEHQKVVKGNQKRLESLRELAGKENLEYPSVTLPPQPHTKEGVDAYNEVIARVRMWVNLNLWQKLKLSRDDAKPLLRLKGFPSFPLVERQANEVDWWDMVCNVKKLINEKKEDGKVFWQNLAGYKRQEALRPYLSSEEDRKKGKKFARYQLGDLLLHLEKKHGEDWGKVYDEAWERIDKKVEGLSKHIKLEEERRSEDAQSKAALTDWLRAKASFVIEGLKEADKDEFCRCELKLQKWYGDLRGKPFAIEAENSILDISGFSKQYNCAFIWQKDGVKKLNLYLIINYFKGGKLRFKKIKPEAFEANRFYTVINKKSGEIVPMEVNFNFDDPNLIILPLAFGKRQGREFIWNDLLSLETGSLKLANGRVIEKTLYNRRTRQDEPALFVALTFERREVLDSSNIKPMNLIGVDRGENIPAVIALTDPEGCPLSRFKDSLGNPTHILRIGESYKEKQRTIQAKKEVEQRRAGGYSRKYASKAKNLADDMVRNTARDLLYYAVTQDAMLIFENLSRGFGRQGKRTFMAERQYTRMEDWLTAKLARYEGLPSKTYLSKTLAQYTSKTCSNCGFTITSADYDRVLEKLKKTATGWMTTINGKELKVEGQITYYNRYKRQNVVKDLSVELDRLSEESVNNDISSWTKGRSGEALSLLKKRFSHRPVQEKFVCLNCGFETHADEQAALNIARSWLFLRSQEYKKYQTNKTTGNTDKRAFVETWQSFYRKKLKEVWKPAV

SEQ ID NO: 2410 - protein, 978 aa, synthetic construct
QEIKRINKIRRRLVKDSNTKKAGKTGPMKTLLVRVMTPDLRERLENLRKKPENIPQPISNTSRANLNKLLTDYTEMKKAILHVYWEEFQKDPVGLMSRVAQPASKKIDQNKLKPEMDEKGNLTTAGFACSQCGQPLFVYKLEQVSEKGKAYTNYFGRCNVAEHEKLILLAQLKPEKDSDEAVTYSLGKFGQRALDFYSIHVTKESTHPVKPLAQIAGNRYASGPVGKALSDACMGTIASFLSKYQDIIIEHQKVVKGNQKRLESLRELAGKENLEYPSVTLPPQPHTKEGVDAYNEVIARVRMWVNLNLWQKLKLSRDDAKPLLRLKGFPSFPLVERQANEVDWWDMVCNVKKLINEKKEDGKVFWQNLAGYKRQEALRPYLSSEEDRKKGKKFARYQLGDLLLHLEKKHGEDWGKVYDEAWERIDKKVEGLSKHIKLEEERRSEDAQSKAALTDWLRAKASFVIEGLKEADKDEFCRCELKLQKWYGDLRGKPFAIEAENSILDISGFSKQYNCAFIWQKDGVKKLNLYLIINYFKGGKLRFKKIKPEAFEANRFYTVINKKSGEIVPMEVNFNFDDPNLIILPLAFGKRQGREFIWNDLLSLETGSLKLANGRVIEKTLYNRRTRQDEPALFVALTFERREVLDSSNIKPMNLIGVDRGENIPAVIALTDPEGCPLSRFKDSLGNPTHILRIGESYKEKQRTIQAKKEVEQRRAGGYSRKYASKAKNLADDMVRNTARDLLYYAVTQDAMLIFENLSRGFGRQGKRTFMAERQYTRMEDWLTAKLAYEGLPSKTYLSKTLAQYFSKTCSNCGFTITSADYDRVLEKLKKTATGWMTTINGKELKVEGQITYYNRYKRQNVVKDLSVELDRLSEESVNNDISSWTKGRSGEALSLLKKRFSHRPVQEKFVCLNCGFETHADEQAALNIARSWLFLRSQEYKKYQTNKTTGNTDKRAFVETWQSFYRKKLKEVWKPAV

SEQ ID NO: 2411 - protein, 977 aa, synthetic construct
QEIKRINKIRRRLVKDSNTKKAGKTGPMKTLLVRVMTPDLRERLENLRKKPENIPQPISNTSRANLNKLLTDYTEMKKAILHVYWEEFQKDPVGLMSRVAQPASKKIDQNKLKPEMDEKGNLTTAGFACSQCGQPLFVYKLEQVSEKGKAYTNYFGRCNVAEHEKLILLAQLKPEKDSDEAVTYSLGKFGQRALDFYSIHVTKESTHPVKPLAQIAGNRYASGPVGKALSDACMGTIASFLSKYQDIIIEHQKVVKGNQKRLESLRELAGKENLEYPSVTLPPQPHTKEGVDAYNEVIARVRMWVNLNLWQKLKLSRDDAKPLLRLKGFPSFPLVERQANEVDWWDMVCNVKKLINEKKEDGKVFWQNLAGYKRQEALRPYLSSEEDRKKGKKFARYQLGDLLLHLEKKHGEDWGKVYDEAWERIDKKVEGLSKHIKLEEERRSEDAQSKAALTDWLRAKASFVIEGLKEADKDEFCRCELKLQKWYGDLRGKPFAIEAENSILDISGFSKQYNCAFIWQKDGVKKLNLYLIINYFKGGKLRFKKIKPEAFEANRFYTVINKKSGEIVPMEVNFNFDDPNLIILPLAFGKRQGREFIWNDLLSLETGSLKLANGRVIEKTLYNRRTRQDEPALFVALTFERREVLDSSNIKPMNLIGVDRGENIPAVIALTDPEGCPLSRFKDSLGNPTHILRIGESYKEKQRTIQAKKEVEQRRAGGYSRKYASKAKNLADDMVRNTARDLLYYAVTQDAMLIFENLSRGFGRQGKRTFMAERQYTRMEDWLTAKAYEGLPSKTYLSKTLAQYTSKTCSNCGFTITSADYDRVLEKLKKTATGWMTTINGKELKVEGQITYYNRYKRQNVVKDLSVELDRLSEESVNNDISSWTKGRSGEALSLLKKRFSHRPVQEKFVCLNCGFETHADEQAALNIARSWLFLRSQEYKKYQTNKTTGNTDKRAFVETWQSFYRKKLKEVWKPAV

SEQ ID NO: 2412 - protein, 978 aa, synthetic construct
QEIKRINKIRRRLVKDSNTKKAGKTGPMKTLLVRVMTPDLRERLENLRKKPENIPQPISNTSRANLNKLLTDYTEMKKAILHVYWEEFQKDPVGLMSRVAQPASKKIDQNKLKPEMDEKGNLTTAGFACSQCGQPLFVYKLEQVSEKGKAYTNYFGRCNVAEHEKLILLAQLKPEKDSDEAVTYSLGKFGQRALDFYSIHVTKESTHPVKPLAQIAGNRYASGPVGKALSDACMGTIASFLSKYQDIIIEHQKVVKGNQKRLESLRELAGKENLEYPSVTLPPQPHTKEGVDAYNEVIARVRMWVNLNLWQKLKLSRDDAKPLLRLKGFPSFPLVERQANEVDWWDMVCNVKKLINEKKEDGKVFWQNLAGYKRQEALRPYLSSEEDRKKGKKFARYQLGDLLLHLEKKHGEDWGKVYDEAWERIDKKVEGLSKHIKLEEERRSEDAQSKAALTDWLRAKASFVIEGLKEADKDEFCRCELKLQKWYGDLRGKPFAIEAENSILDISGFSKQYNCAFIWQKDGVKKLNLYLIINYFKGGKLRFKKIKPEAFEANRFYTVINKKSGEIVPMEVNFNFDDPNLIILPLAFGKRQGREFIWNDLLSLETGSLKLANGRVIEKTLYNRRTRQDEPALFVALTFERREVLDSSNIKPMNLIGVDRGENIPAVIALTDPEGCPLSRFKDSLGNPTHILRIGESYKEKQRTIQAKKEVEQRRAGGYSRKYASKAKNLADDMVRNTARDLLYYAVTQDAMLIFENLSRGFGRQGKRTFMAERQYTRMEDWLTAKLAYEGLPSQTYLSKTLAQYTSKTCSNCGFTITSADYDRVLEKLKKTATGWMTTINGKELKVEGQITYYNRYKRQNVVKDLSVELDRLSEESVNNDISSWTKGRSGEALSLLKKRFSHRPVQEKFVCLNCGFETHADEQAALNIARSWLFLRSQEYKKYQTNKTTGNTDKRAFVETWQSFYRKKLKEVWKPAV

SEQ ID NO: 2413 - protein, 978 aa, synthetic construct
QEIKRINKIRRRLVKDSNTKKAGKTGPMKTLLVRVMTPDLRERLENLRKKPENIPQPISNTSRANLNKLLTDYTEMKKAILHVYWEEFQKDPVGLMSRVAQPASKKIDQNKLKPEMDEKGNLTTAGFACSQCGQPLFVYKLEQVSEKGKAYTNYFGRCNVAEHEKLILLAQLKPEKDSDEAVTYSLGKFGQRALDFYSIHVTKESTHPVKPLAQIAGNRYASGPVGKALSDACMGTIASFLSKYQDIIIEHQKVVKGNQKRLESLRELAGKENLEYPSVTLPPQPHTKEGVDAYNEVIARVRMWVNLNLWQKLKLSRDDAKPLLRLKGFPSFPLVERQANEVDWWDMVCNVKKLINEKKEDGKVFWQNLAGYKRQEALRPYLSSEEDRKKGKKFARYQLGDLLLHLEKKHGEDWGKVYDEAWERIDKKVEGLSKHIKLEEERRSEDAQSKAALTDWLRAKASFVIEGLKEADKDEFCRCELKLQKWYGDLRGKPFAIEAENSILDISGFSKQYNCAFIWQKDGVKKLNLYLIINYFKGGKLRFKKIKPEAFEANRFYTVINKKSGEIVPMEVNFNFDDPNLIILPLAFGKRQGREFIWNDLLSLETGSLKLANGRVIEKTLYNRRTRQDEPALFVALTFERREVLDSSNIKPMNLIGVDRGENIPAVIALTDPEGCPLSRFKDSLGNPTHILRIGESYKEKQRTIQAKKEVEQRRAGGYSRKYASKAKNLADDMVRNTARDLLYYAVTQDAMLIFENLSRGFGRQGKRTFMAERQYTRMEDWLTAKLAYNGLPSKTYLSKTLAQYTSKTCSNCGFTITSADYDRVLEKLKKTATGWMTTINGKELKVEGQITYYNRYKRQNVVKDLSVELDRLSEESVNNDISSWTKGRSGEALSLLKKRFSHRPVQEKFVCLNCGFETHADEQAALNIARSWLFLRSQEYKKYQTNKTTGNTDKRAFVETWQSFYRKKLKEVWKPAV

SEQ ID NO: 2414 - protein, 979 aa, synthetic construct
QEIKRINKIRRRLVKDSNTKKAGKTGPMKTLLVRVMTPDLRERLENLRKKPENIPQPISNTSRANLNKLLTDYTEMKKAILHVYWEEFQKDPVGLMSRVAQPASKKIDQNKLKPEMDEKGNLTTAGFACSQCGQPLFVYKLEQVSEKGKAYTNYFGRCNVAEHEKLILLAQLKPEKDSDEAVTYSLGKFGQRALDFYSIHVTKESTHPVKPLAQIAGNRYASGPVGKALSDACMGTIASFLSKYQDIIIEHQKVVKGNQKRLESLRELAGKENLEYPSVTLPPQPHTKEGVDAYNEVIARVRMWVNLNLWQKLKLSRDDAKPLLRLKGFPSFPLVERQANEVDWWDMVCNVKKLINEKKEDGKVFWQNLAGYKRQEALRPYLSSEEDRKKGKKFARYQLGDLLLHLEKKHGEDWGKVYDEAWERIDKKVEGLSKHIKLEEERRSEDAQSKAALTDWLRAKASFVIEGLKEADKDEFCRCELKLQKWYGDLRGKPFAIEAENSILDISGFSKQYNCAFIWQKDGVKKLNLYLIINYFKGGKLRFKKIKPEAFEANRFYTVINKKSGEIVPMEVNFNFDDPNLIILPLAFGKRQGREFIWNDLLSLETGSLKLANGRVIEKTLYNRRTRQDEPALFVALTFERREVLDSSNIKPMNLIGVDRGENIPAVIALTDPEGCPLSRFKDSLGNPTHILRIGESYKEKQRTIQAKKEVEQRRAGGYSRKYASKAKNLADDMVRNTARDLLYYAVTQDAMLIFENLSRGFGRQGKRTFMAERQYTRMEDWLTAKLAYEGLPSKTYLHSKTLAQYTSKTCSNCGFTITSADYDRVLEKLKKTATGWMTTINGKELKVEGQITYYNRYKRQNVVKDLSVELDRLSEESVNNDISSWTKGRSGEALSLLKKRFSHRPVQEKFVCLNCGFETHADEQAALNIARSWLFLRSQEYKKYQTNKTTGNTDKRAFVETWQSFYRKKLKEVWKPAV

SEQ ID NO: 2415 - protein, 978 aa, synthetic construct
QEIKRINKIRRRLVKDSNTKKAGKTGPMKTLLVRVMTPDLRERLENLRKKPENIPQPISNTSRANLNKLLTDYTEMKKAILHVYWEEFQKDPVGLMSRVAQPASKKIDQNKLKPEMDEKGNLTTAGFACSQCGQPLFVYKLEQVSEKGKAYTNYFGRCNVAEHEKLILLAQLKPEKDSDEAVTYSLGKFGQRALDFYSIHVTKESTHPVKPLAQIAGNRYASGPVGKALSDACMGTIASFLSKYQDIIIEHQKVVKGNQKRLESLRELAGKENLEYPSVTLPPQPHTKEGVDAYNEVIARVRMWVNLNLWQKLKLSRDDAKPLLRLKGFPSFPLVERQANEVDWWDMVCNVKKLINEKKEDGKVFWQNLAGYKRQEALRPYLSSEEDRKKGKKFARYQLGDLLLHLEKKHGEDWGKVYDEAWERIDKKVEGLSKHIKLEEERRSEDAQSKAALTDWLRAKASFVIEGLKEADKDEFCRCELKLQKWYGDLRGKPFAIEAENSILDISGFSKQYNCAFIWQKDGVKKLNLYLIINYFKGGKLRFKKIKPEAFEANRFYTVINKKSGEIVPMEVNFNFDDPNLIILPLAFGKRQGREFIWNDLLSLETGSLKLANGRVIEKTLYNRRTRQDEPALFVALTFERREVLDSSNIKPMNLIGVDRGENIPAVIALTDPEGCPLSRFKDSLGNPTHILRIGESYKEKQRTIQAKKEVEQRRAGGYSRKYASKAKNLADDMVRNTARDLLYYAVTQDAMLIFENLSRGFGRQGKRTFMAERQYTRMEDWLTAKLAYEGLPSKVYLSKTLAQYTSKTCSNCGFTITSADYDRVLEKLKKTATGWMTTINGKELKVEGQITYYNRYKRQNVVKDLSVELDRLSEESVNNDISSWTKGRSGEALSLLKKRFSHRPVQEKFVCLNCGFETHADEQAALNIARSWLFLRSQEYKKYQTNKTTGNTDKRAFVETWQSFYRKKLKEVWKPAV

SEQ ID NO: 2416 - protein, 979 aa, synthetic construct
QEIKRINKIRRRLVKDSNTKKAGKTGPMKTLLVRVMTPDLRERLENLRKKPENIPQPISNTSRANLNKLLTDYTEMKKAILHVYWEEFQKDPVGLMSRVAQPASKKIDQNKLKPEMDEKGNLTTAGFACSQCGQPLFVYKLEQVSEKGKAYTNYFGRCNVAEHEKLILLAQLKPEKDSDEAVTYSLGKFGQRALDFYSIHVTKESTHPVKPLAQIAGNRYASGPVGKALSDACMGTIASFLSKYQDIIIEHQKVVKGNQKRLESLRELAGKENLEYPSVTLPPQPHTKEGVDAYNEVIARVRMWVNLNLWQKLKLSRDDAKPLLRLKGFPSFPLVERQANEVDWWDMVCNVKKLINEKKEDGKVFWQNLAGYKRQEALRPYLSSEEDRKKGKKFARYQLGDLLLHLEKKHGEDWGKVYDEAWERIDKKVEGLSKHIKLEEERRSEDAQSKAALTDWLRAKASFVIEGLKEADKDEFCRCELKLQKWYGDLRGKPFAIEAENSILDISGFSKQYNCAFIWQKDGVKKLNLYLIINYFKGGKLRFKKIKPEAFEANRFYTVINKKSGEIVPMEVNFNFDDPNLIILPLAFGKRQGREFIWNDLLSLETGSLKLANGRVIEKTLYNRRTRQDEPALFVALTFERREVLDSSNIKPMNLIGVDRGENIPAVIALTDPEGCPLSRFKDSLGNPTHILRIGESYKEKQRTIQAKKEVEQRRAGGYSRKYASKAKNLADDMVRNTARDLLYYAVTQDAMLIFENLSRGFGRQGKRTFMAERQYTRMEDWLTAKLQAYEGLPSKTYLSKTLAQYTSKTCSNCGFTITSADYDRVLEKLKKTATGWMTTINGKELKVEGQITYYNRYKRQNVVKDLSVELDRLSEESVNNDISSWTKGRSGEALSLLKKRFSHRPVQEKFVCLNCGFETHADEQAALNIARSWLFLRSQEYKKYQTNKTTGNTDKRAFVETWQSFYRKKLKEVWKPAV

SEQ ID NO: 2417 - protein, 979 aa, synthetic construct
QEIKRINKIRRRLVKDSNTKKAGKTGPMKTLLVRVMTPDLRERLENLRKKPENIPQPISNTSRANLNKLLTDYTEMKKAILHVYWEEFQKDPVGLMSRVAQPASKKIDQNKLKPEMDEKGNLTTAGFACSQCGQPLFVYKLEQVSEKGKAYTNYFGRCNVAEHEKLILLAQLKPEKDSDEAVTYSLGKFGQRALDFYSIHVTKESTHPVKPLAQIAGNRYASGPVGKALSDACMGTIASFLSKYQDIIIEHQKVVKGNQKRLESLRELAGKENLEYPSVTLPPQPHTKEGVDAYNEVIARVRMWVNLNLWQKLKLSRDDAKPLLRLKGFPSFPLVERQANEVDWWDMVCNVKKLINEKKEDGKVFWQNLAGYKRQEALRPYLSSEEDRKKGKKFARYQLGDLLLHLEKKHGEDWGKVYDEAWERIDKKVEGLSKHIKLEEERRSEDAQSKAALTDWLRAKASFVIEGLKEADKDEFCRCELKLQKWYGDLRGKPFAIEAENSILDISGFSKQYNCAFIWQKDGVKKLNLYLIINYFKGGKLRFKKIKPEAFEANRFYTVINKKSGEIVPMEVNFNFDDPNLIILPLAFGKRQGREFIWNDLLSLETGSLKLANGRVIEKTLYNRRTRQDEPALFVALTFERREVLDSSNIKPMNLIGVDRGENIPAVIALTDPEGCPLSRFKDSLGNPTHILRIGESYKEKQRTIQAKKEVEQRRAGGYSRKYASKAKNLADDMVRNTARDLLYYAVTQDAMLIFENLSRGFGRQGKRTFMAERQYTRMEDWLTAKLAYEGPLPSKTYLSKTLAQYTSKTCSNCGFTITSADYDRVLEKLKKTATGWMTTINGKELKVEGQITYYNRYKRQNVVKDLSVELDRLSEESVNNDISSWTKGRSGEALSLLKKRFSHRPVQEKFVCLNCGFETHADEQAALNIARSWLFLRSQEYKKYQTNKTTGNTDKRAFVETWQSFYRKKLKEVWKPAV

SEQ ID NO: 2418 - protein, 979 aa, synthetic construct
QEIKRINKIRRRLVKDSNTKKAGKTGPMKTLLVRVMTPDLRERLENLRKKPENIPQPISNTSRANLNKLLTDYTEMKKAILHVYWEEFQKDPVGLMSRVAQPASKKIDQNKLKPEMDEKGNLTTAGFACSQCGQPLFVYKLEQVSEKGKAYTNYFGRCNVAEHEKLILLAQLKPEKDSDEAVTYSLGKFGQRALDFYSIHVTKESTHPVKPLAQIAGNRYASGPVGKALSDACMGTIASFLSKYQDIIIEHQKVVKGNQKRLESLRELAGKENLEYPSVTLPPQPHTKEGVDAYNEVIARVRMWVNLNLWQKLKLSRDDAKPLLRLKGFPSFPLVERQANEVDWWDMVCNVKKLINEKKEDGKVFWQNLAGYKRQEALRPYLSSEEDRKKGKKFARYQLGDLLLHLEKKHGEDWGKVYDEAWERIDKKVEGLSKHIKLEEERRSEDAQSKAALTDWLRAKASFVIEGLKEADKDEFCRCELKLQKWYGDLRGKPFAIEAENSILDISGFSKQYNCAFIWQKDGVKKLNLYLIINYFKGGKLRFKKIKPEAFEANRFYTVINKKSGEIVPMEVNFNFDDPNLIILPLAFGKRQGREFIWNDLLSLETGSLKLANGRVIEKTLYNRRTRQDEPALFVALTFERREVLDSSNIKPMNLIGVDRGENIPAVIALTDPEGCPLSRFKDSLGNPTHILRIGESYKEKQRTIQAKKEVEQRRAGGYSRKYASKAKNLADDMVRNTARDLLYYAVTQDAMLIFENLSRGFGRQGKRTFMAERQYTRMEDWLTAKLAYEGLPSKTYLSKRTLAQYTSKTCSNCGFTITSADYDRVLEKLKKTATGWMTTINGKELKVEGQITYYNRYKRQNVVKDLSVELDRLSEESVNNDISSWTKGRSGEALSLLKKRFSHRPVQEKFVCLNCGFETHADEQAALNIARSWLFLRSQEYKKYQTNKTTGNTDKRAFVETWQSFYRKKLKEVWKPAV

SEQ ID NO: 2419 - protein, 979 aa, synthetic construct
QEIKRINKIRRRLVKDSNTKKAGKTGPMKTLLVRVMTPDLRERLENLRKKPENIPQPISNTSRANLNKLLTDYTEMKKAILHVYWEEFQKDPVGLMSRVAQPASKKIDQNKLKPEMDEKGNLTTAGFACSQCGQPLFVYKLEQVSEKGKAYTNYFGRCNVAEHEKLILLAQLKPEKDSDEAVTYSLGKFGQRALDFYSIHVTKESTHPVKPLAQIAGNRYASGPVGKALSDACMGTIASFLSKYQDIIIEHQKVVKGNQKRLESLRELAGKENLEYPSVTLPPQPHTKEGVDAYNEVIARVRMWVNLNLWQKLKLSRDDAKPLLRLKGFPSFPLVERQANEVDWWDMVCNVKKLINEKKEDGKVFWQNLAGYKRQEALRPYLSSEEDRKKGKKFARYQLGDLLLHLEKKHGEDWGKVYDEAWERIDKKVEGLSKHIKLEEERRSEDAQSKAALTDWLRAKASFVIEGLKEADKDEFCRCELKLQKWYGDLRGKPFAIEAENSILDISGFSKQYNCAFIWQKDGVKKLNLYLIINYFKGGKLRFKKIKPEAFEANRFYTVINKKSGEIVPMEVNFNFDDPNLIILPLAFGKRQGREFIWNDLLSLETGSLKLANGRVIEKTLYNRRTRQDEPALFVALTFERREVLDSSNIKPMNLIGVDRGENIPAVIALTDPEGCPLSRFKDSLGNPTHILRIGESYKEKQRTIQAKKEVEQRRAGGYSRKYASKAKNLADDMVRNTARDLLYYAVTQDAMLIFENLSRGFGRQGKRTFMAERQYTRMEDWLTAKLAYEGLPSKTYLSKTLAQYTSKTCSNCWGFTITSADYDRVLEKLKKTATGWMTTINGKELKVEGQITYYNRYKRQNVVKDLSVELDRLSEESVNNDISSWTKGRSGEALSLLKKRFSHRPVQEKFVCLNCGFETHADEQAALNIARSWLFLRSQEYKKYQTNKTTGNTDKRAFVETWQSFYRKKLKEVWKPAV

SEQ ID NO: 2420 - protein, 979 aa, synthetic construct
QEIKRINKIRRRLVKDSNTKKAGKTGPMKTLLVRVMTPDLRERLENLRKKPENIPQPISNTSRANLNKLLTDYTEMKKAILHVYWEEFQKDPVGLMSRVAQPASKKIDQNKLKPEMDEKGNLTTAGFACSQCGQPLFVYKLEQVSEKGKAYTNYFGRCNVAEHEKLILLAQLKPEKDSDEAVTYSLGKFGQRALDFYSIHVTKESTHPVKPLAQIAGNRYASGPVGKALSDACMGTIASFLSKYQDIIIEHQKVVKGNQKRLESLRELAGKENLEYPSVTLPPQPHTKEGVDAYNEVIARVRMWVNLNLWQKLKLSRDDAKPLLRLKGFPSFPLVERQANEVDWWDMVCNVKKLINEKKEDGKVFWQNLAGYKRQEALRPYLSSEEDRKKGKKFARYQLGDLLLHLEKKHGEDWGKVYDEAWERIDKKVEGLSKHIKLEEERRSEDAQSKAALTDWLRAKASFVIEGLKEADKDEFCRCELKLQKWYGDLRGKPFAIEAENSILDISGFSKQYNCAFIWQKDGVKKLNLYLIINYFKGGKLRFKKIKPEAFEANRFYTVINKKSGEIVPMEVNFNFDDPNLIILPLAFGKRQGREFIWNDLLSLETGSLKLANGRVIEKTLYNRRTRQDEPALFVALTFERREVLDSSNIKPMNLIGVDRGENIPAVIALTDPEGCPLSRFKDSLGNPTHILRIGESYKEKQRTIQAKKEVEQRRAGGYSRKYASKAKNLADDMVRNTARDLLYYAVTQDAMLIFENLSRGFGRQGKRTFMAERQYTRMEDWLTAKLANYEGLPSKTYLSKTLAQYTSKTCSNCGFTITSADYDRVLEKLKKTATGWMTTINGKELKVEGQITYYNRYKRQNVVKDLSVELDRLSEESVNNDISSWTKGRSGEALSLLKKRFSHRPVQEKFVCLNCGFETHADEQAALNIARSWLFLRSQEYKKYQTNKTTGNTDKRAFVETWQSFYRKKLKEVWKPAV

SEQ ID NO: 2421 - protein, 978 aa, synthetic construct
QEIKRINKIRRRLVKDSNTKKAGKTGPMKTLLVRVMTPDLRERLENLRKKPENIPQPISNTSRANLNKLLTDYTEMKKAILHVYWEEFQKDPVGLMSRVAQPASKKIDQNKLKPEMDEKGNLTTAGFACSQCGQPLFVYKLEQVSEKGKAYTNYFGRCNVAEHEKLILLAQLKPEKDSDEAVTYSLGKFGQRALDFYSIHVTKESTHPVKPLAQIAGNRYASGPVGKALSDACMGTIASFLSKYQDIIIEHQKVVKGNQKRLESLRELAGKENLEYPSVTLPPQPHTKEGVDAYNEVIARVRMWVNLNLWQKLKLSRDDAKPLLRLKGFPSFPLVERQANEVDWWDMVCNVKKLINEKKEDGKVFWQNLAGYKRQEALRPYLSSEEDRKKGKKFARYQLGDLLLHLEKKHGEDWGKVYDEAWERIDKKVEGLSKHIKLEEERRSEDAQSKAALTDWLRAKASFVIEGLKEADKDEFCRCELKLQKWYGDLRGKPFAIEAENSILDISGFSKQYNCAFIWQKDGVKKLNLYLIINYFKGGKLRFKKIKPEAFEANRFYTVINKKSGEIVPMEVNFNFDDPNLIILPLAFGKRQGREFIWNDLLSLETGSLKLANGRVIEKTLYNRRTRQDEPALFVALTFERREVLDSSNIKPMNLIGVDRGENIPAVIALTDPEGCPLSRFKDSLGNPTHILRIGESYKEKQRTIQAKKEVEQRRAGGYSRKYASKAKNLADDMVRNTARDLLYYAVTQDAMLIFENLSRGFGRQGKRTFMAERQYTRMEDWLTAKLAYEGLPSKTYLSKTLAQYTSKTCSNSGFTITSADYDRVLEKLKKTATGWMTTINGKELKVEGQITYYNRYKRQNVVKDLSVELDRLSEESVNNDISSWTKGRSGEALSLLKKRFSHRPVQEKFVCLNCGFETHADEQAALNIARSWLFLRSQEYKKYQTNKTTGNTDKRAFVETWQSFYRKKLKEVWKPAV

SEQ ID NO: 2422 - protein, 978 aa, synthetic construct
QEIKRINKIRRRLVKDSNTKKAGKTGPMKTLLVRVMTPDLRERLENLRKKPENIPQPISNTSRANLNKLLTDYTEMKKAILHVYWEEFQKDPVGLMSRVAQPASKKIDQNKLKPEMDEKGNLTTAGFACSQCGQPLFVYKLEQVSEKGKAYTNYFGRCNVAEHEKLILLAQLKPEKDSDEAVTYSLGKFGQRALDFYSIHVTKESTHPVKPLAQIAGNRYASGPVGKALSDACMGTIASFLSKYQDIIIEHQKVVKGNQKRLESLRELAGKENLEYPSVTLPPQPHTKEGVDAYNEVIARVRMWVNLNLWQKLKLSRDDAKPLLRLKGFPSFPLVERQANEVDWWDMVCNVKKLINEKKEDGKVFWQNLAGYKRQEALRPYLSSEEDRKKGKKFARYQLGDLLLHLEKKHGEDWGKVYDEAWERIDKKVEGLSKHIKLEEERRSEDAQSKAALTDWLRAKASFVIEGLKEADKDEFCRCELKLQKWYGDLRGKPFAIEAENSILDISGFSKQYNCAFIWQKDGVKKLNLYLIINYFKGGKLRFKKIKPEAFEANRFYTVINKKSGEIVPMEVNFNFDDPNLIILPLAFGKRQGREFIWNDLLSLETGSLKLANGRVIEKTLYNRRTRQDEPALFVALTFERREVLDSSNIKPMNLIGVDRGENIPAVIALTDPEGCPLSRFKDSLGNPTHILRIGESYKEKQRTIQAKKEVEQRRAGGYSRKYASKAKNLADDMVRNTARDLLYYAVTQDAMLIFENLSRGFGRQGKRTFMAERQYTRMEDWLTAKLAYEGLPSKTYLSKTLSQYTSKTCSNCGFTITSADYDRVLEKLKKTATGWMTTINGKELKVEGQITYYNRYKRQNVVKDLSVELDRLSEESVNNDISSWTKGRSGEALSLLKKRFSHRPVQEKFVCLNCGFETHADEQAALNIARSWLFLRSQEYKKYQTNKTTGNTDKRAFVETWQSFYRKKLKEVWKPAV

SEQ ID NO: 2423 - protein, 979 aa, synthetic construct
QEIKRINKIRRRLVKDSNTKKAGKTGPMKTLLVRVMTPDLRERLENLRKKPENIPQPISNTSRANLNKLLTDYTEMKKAILHVYWEEFQKDPVGLMSRVAQPASKKIDQNKLKPEMDEKGNLTTAGFACSQCGQPLFVYKLEQVSEKGKAYTNYFGRCNVAEHEKLILLAQLKPEKDSDEAVTYSLGKFGQRALDFYSIHVTKESTHPVKPLAQIAGNRYASGPVGKALSDACMGTIASFLSKYQDIIIEHQKVVKGNQKRLESLRELAGKENLEYPSVTLPPQPHTKEGVDAYNEVIARVRMWVNLNLWQKLKLSRDDAKPLLRLKGFPSFPLVERQANEVDWWDMVCNVKKLINEKKEDGKVFWQNLAGYKRQEALRPYLSSEEDRKKGKKFARYQLGDLLLHLEKKHGEDWGKVYDEAWERIDKKVEGLSKHIKLEEERRSEDAQSKAALTDWLRAKASFVIEGLKEADKDEFCRCELKLQKWYGDLRGKPFAIEAENSILDISGFSKQYNCAFIWQKDGVKKLNLYLIINYFKGGKLRFKKIKPEAFEANRFYTVINKKSGEIVPMEVNFNFDDPNLIILPLAFGKRQGREFIWNDLLSLETGSLKLANGRVIEKTLYNRRTRQDEPALFVALTFERREVLDSSNIKPMNLIGVDRGENIPAVIALTDPEGCPLSRFKDSLGNPTHILRIGESYKEKQRTIQAKKEVEQRRAGGYSRKYASKAKNLADDMVRNTARDLLYYAVTQDAMLIFENLSRGFGRQGKRTFMAERQYTRMEDWLTAKLAYEGLPSKTYRLSKTLAQYTSKTCSNCGFTITSADYDRVLEKLKKTATGWMTTINGKELKVEGQITYYNRYKRQNVVKDLSVELDRLSEESVNNDISSWTKGRSGEALSLLKKRFSHRPVQEKFVCLNCGFETHADEQAALNIARSWLFLRSQEYKKYQTNKTTGNTDKRAFVETWQSFYRKKLKEVWKPAV

SEQ ID NO: 2424 - protein, 978 aa, synthetic construct
QEIKRINKIRRRLVKDSNTKKAGKTGPMKTLLVRVMTPDLRERLENLRKKPENIPQPISNTSRANLNKLLTDYTEMKKAILHVYWEEFQKDPVGLMSRVAQPASKKIDQNKLKPEMDEKGNLTTAGFACSQCGQPLFVYKLEQVSEKGKAYTNYFGRCNVAEHEKLILLAQLKPEKDSDEAVTYSLGKFGQRALDFYSIHVTKESTHPVKPLAQIAGNRYASGPVGKALSDACMGTIASFLSKYQDIIIEHQKVVKGNQKRLESLRELAGKENLEYPSVTLPPQPHTKEGVDAYNEVIARVRMWVNLNLWQKLKLSRDDAKPLLRLKGFPSFPLVERQANEVDWWDMVCNVKKLINEKKEDGKVFWQNLAGYKRQEALRPYLSSEEDRKKGKKFARYQLGDLLLHLEKKHGEDWGKVYDEAWERIDKKVEGLSKHIKLEEERRSEDAQSKAALTDWLRAKASFVIEGLKEADKDEFCRCELKLQKWYGDLRGKPFAIEAENSILDISGFSKQYNCAFIWQKDGVKKLNLYLIINYFKGGKLRFKKIKPEAFEANRFYTVINKKSGEIVPMEVNFNFDDPNLIILPLAFGKRQGREFIWNDLLSLETGSLKLANGRVIEKTLYNRRTRQDEPALFVALTFERREVLDSSNIKPMNLIGVDRGENIPAVIALTDPEGCPLSRFKDSLGNPTHILRIGESYKEKQRTIQAKKEVEQRRAGGYSRKYASKAKNLADDMVRNTARDLLYYAVTQDAMLIFENLSRGFGRQGKRTFMAERQYTRMEDWLTAKRAYEGLPSKTYLSKTLAQYTSKTCSNCGFTITSADYDRVLEKLKKTATGWMTTINGKELKVEGQITYYNRYKRQNVVKDLSVELDRLSEESVNNDISSWTKGRSGEALSLLKKRFSHRPVQEKFVCLNCGFETHADEQAALNIARSWLFLRSQEYKKYQTNKTTGNTDKRAFVETWQSFYRKKLKEVWKPAV

SEQ ID NO: 2425 - protein, 978 aa, synthetic construct
QEIKRINKIRRRLVKDSNTKKAGKTGPMKTLLVRVMTPDLRERLENLRKKPENIPQPISNTSRANLNKLLTDYTEMKKAILHVYWEEFQKDPVGLMSRVAQPASKKIDQNKLKPEMDEKGNLTTAGFACSQCGQPLFVYKLEQVSEKGKAYTNYFGRCNVAEHEKLILLAQLKPEKDSDEAVTYSLGKFGQRALDFYSIHVTKESTHPVKPLAQIAGNRYASGPVGKALSDACMGTIASFLSKYQDIIIEHQKVVKGNQKRLESLRELAGKENLEYPSVTLPPQPHTKEGVDAYNEVIARVRMWVNLNLWQKLKLSRDDAKPLLRLKGFPSFPLVERQANEVDWWDMVCNVKKLINEKKEDGKVFWQNLAGYKRQEALRPYLSSEEDRKKGKKFARYQLGDLLLHLEKKHGEDWGKVYDEAWERIDKKVEGLSKHIKLEEERRSEDAQSKAALTDWLRAKASFVIEGLKEADKDEFCRCELKLQKWYGDLRGKPFAIEAENSILDISGFSKQYNCAFIWQKDGVKKLNLYLIINYFKGGKLRFKKIKPEAFEANRFYTVINKKSGEIVPMEVNFNFDDPNLIILPLAFGKRQGREFIWNDLLSLETGSLKLANGRVIEKTLYNRRTRQDEPALFVALTFERREVLDSSNIKPMNLIGVDRGENIPAVIALTDPEGCPLSRFKDSLGNPTHILRIGESYKEKQRTIQAKKEVEQRRAGGYSRKYASKAKNLADDMVRNTARDLLYYAVTQDAMLIFENLSRGFGRQGKRTFMAERQYTRMEDWLTAKDAYEGLPSKTYLSKTLAQYTSKTCSNCGFTITSADYDRVLEKLKKTATGWMTTINGKELKVEGQITYYNRYKRQNVVKDLSVELDRLSEESVNNDISSWTKGRSGEALSLLKKRFSHRPVQEKFVCLNCGFETHADEQAALNIARSWLFLRSQEYKKYQTNKTTGNTDKRAFVETWQSFYRKKLKEVWKPAV

SEQ ID NO: 2426 - protein, 978 aa, synthetic construct
QEIKRINKIRRRLVKDSNTKKAGKTGPMKTLLVRVMTPDLRERLENLRKKPENIPQPISNTSRANLNKLLTDYTEMKKAILHVYWEEFQKDPVGLMSRVAQPASKKIDQNKLKPEMDEKGNLTTAGFACSQCGQPLFVYKLEQVSEKGKAYTNYFGRCNVAEHEKLIQLAQLKPEKDSDEAVTYSLGKFGQRALDFYSIHVTKESTHPVKPLAQIAGNRYASGPVGKALSDACMGTIASFLSKYQDIIIEHQKVVKGNQKRLESLRELAGKENLEYPSVTLPPQPHTKEGVDAYNEVIARVRMWVNLNLWQKLKLSRDDAKPLLRLKGFPSFPLVERQANEVDWWDMVCNVKKLINEKKEDGKVFWQNLAGYKRQEALRPYLSSEEDRKKGKKFARYQLGDLLLHLEKKHGEDWGKVYDEAWERIDKKVEGLSKHIKLEEERRSEDAQSKAALTDWLRAKASFVIEGLKEADKDEFCRCELKLQKWYGDLRGKPFAIEAENSILDISGFSKQYNCAFIWQKDGVKKLNLYLIINYFKGGKLRFKKIKPEAFEANRFYTVINKKSGEIVPMEVNFNFDDPNLIILPLAFGKRQGREFIWNDLLSLETGSLKLANGRVIEKTLYNRRTRQDEPALFVALTFERREVLDSSNIKPMNLIGVDRGENIPAVIALTDPEGCPLSRFKDSLGNPTHILRIGESYKEKQRTIQAKKEVEQRRAGGYSRKYASKAKNLADDMVRNTARDLLYYAVTQDAMLIFENLSRGFGRQGKRTFMAERQYTRMEDWLTAKLAYEGLPSKTYLSKTLAQYTSKTCSNCGFTITSADYDRVLEKLKKTATGWMTTINGKELKVEGQITYYNRYKRQNVVKDLSVELDRLSEESVNNDISSWTKGRSGEALSLLKKRFSHRPVQEKFVCLNCGFETHADEQAALNIARSWLFLRSQEYKKYQTNKTTGNTDKRAFVETWQSFYRKKLKEVWKPAV

SEQ ID NO: 2427 - protein, 978 aa, synthetic construct
QEIKRINKIRRRLVKDSNTKKAGKTGPMKTLLVRVMTPDLRERLENLRKKPENIPQPISNTSRANLNKLLTDYTEMKKAILHVYWEEFQKDPVGLMSRVAQPASKKIDQNKLKPEMDEKGNLTTAGFACSQCGQPLFVYKLEQVSEKGKAYTNYFGRCNVAEHEKLILLAQLKPEKDSDEAVTYSLGKFGQRALDFYSIHVTKESTHPVKPLAQIAGNRYMSGPVGKALSDACMGTIASFLSKYQDIIIEHQKVVKGNQKRLESLRELAGKENLEYPSVTLPPQPHTKEGVDAYNEVIARVRMWVNLNLWQKLKLSRDDAKPLLRLKGFPSFPLVERQANEVDWWDMVCNVKKLINEKKEDGKVFWQNLAGYKRQEALRPYLSSEEDRKKGKKFARYQLGDLLLHLEKKHGEDWGKVYDEAWERIDKKVEGLSKHIKLEEERRSEDAQSKAALTDWLRAKASFVIEGLKEADKDEFCRCELKLQKWYGDLRGKPFAIEAENSILDISGFSKQYNCAFIWQKDGVKKLNLYLIINYFKGGKLRFKKIKPEAFEANRFYTVINKKSGEIVPMEVNFNFDDPNLIILPLAFGKRQGREFIWNDLLSLETGSLKLANGRVIEKTLYNRRTRQDEPALFVALTFERREVLDSSNIKPMNLIGVDRGENIPAVIALTDPEGCPLSRFKDSLGNPTHILRIGESYKEKQRTIQAKKEVEQRRAGGYSRKYASKAKNLADDMVRNTARDLLYYAVTQDAMLIFENLSRGFGRQGKRTFMAERQYTRMEDWLTAKLAYEGLPSKTYLSKTLAQYTSKTCSNCGFTITSADYDRVLEKLKKTATGWMTTINGKELKVEGQITYYNRYKRQNVVKDLSVELDRLSEESVNNDISSWTKGRSGEALSLLKKRFSHRPVQEKFVCLNCGFETHADEQAALNIARSWLFLRSQEYKKYQTNKTTGNTDKRAFVETWQSFYRKKLKEVWKPAV

SEQ ID NO: 2428 - protein, 978 aa, synthetic construct
QEIKRINKIRRRLVKDSNTKKAGKTGPMKTLLVRVMTPDLRERLENLRKKPENIPQPISNTSRANLNKLLTDYTEMKKAILHVYWEEFQKDPVGLMSRVAQPASKKIDQNKLKPEMDEKGNLTTAGFACSQCGQPLFVYKLEQVSEKGKAYTNYFGRCNVAEHEKLILLAQLKPEKDSDEAVTYSLGKFGQRALDFYSIHVTKESTHPVKPLAQIAGNRYASGPVGKALSDACMGTIASFLSKYQDIIIEHQKVVKGNQKRLESLRELAGKENLEYPSVTLPPQPHTKEGVDAYNEVIARVRMWVNLNLWQKLKLSRDDAKPLLRLKGFPSFPLVERQANEVDWWDMVCNVKKLINEKKEDGKVFWQNLAIYKRQEALRPYLSSEEDRKKGKKFARYQLGDLLLHLEKKHGEDWGKVYDEAWERIDKKVEGLSKHIKLEEERRSEDAQSKAALTDWLRAKASFVIEGLKEADKDEFCRCELKLQKWYGDLRGKPFAIEAENSILDISGFSKQYNCAFIWQKDGVKKLNLYLIINYFKGGKLRFKKIKPEAFEANRFYTVINKKSGEIVPMEVNFNFDDPNLIILPLAFGKRQGREFIWNDLLSLETGSLKLANGRVIEKTLYNRRTRQDEPALFVALTFERREVLDSSNIKPMNLIGVDRGENIPAVIALTDPEGCPLSRFKDSLGNPTHILRIGESYKEKQRTIQAKKEVEQRRAGGYSRKYASKAKNLADDMVRNTARDLLYYAVTQDAMLIFENLSRGFGRQGKRTFMAERQYTRMEDWLTAKLAYEGLPSKTYLSKTLAQYTSKTCSNCGFTITSADYDRVLEKLKKTATGWMTTINGKELKVEGQITYYNRYKRQNVVKDLSVELDRLSEESVNNDISSWTKGRSGEALSLLKKRFSHRPVQEKFVCLNCGFETHADEQAALNIARSWLFLRSQEYKKYQTNKTTGNTDKRAFVETWQSFYRKKLKEVWKPAV

SEQ ID NO: 2429 - protein, 979 aa, synthetic construct
QEIKRINKIRRRLVKDSNTKKAGKTGPMKTLLVRVMTPDLRERLENLRKKPENIPQPISNTSRANLNKLLTDYTEMKKAILHVYWEEFQKDPVGLMSRVAQPASKKIDQNKLKPEMDEKGNLTTAGFACSQCGQPLFVYKLEQVSEKGKAYTNYFGRCNVAEHEKLILLAQLKPEKDSDEAVTYSLGKFGQRALDFYSIHVTKESTHPVKPLAQIAGNRYASGPVGKALSDACMGTIASFLSKYQDIIIEHQKVVKGNQKRLESLRELAGKENLEYPSVTLPPQPHTKEGVDAYNEVIARVRMWVNLNLWQKLKLSRDDAKPLLRLKGFPSFPLVERQANEVDWWDMVCNVKKLINEKKEDGKVFWQNLAGYKRQEALRPYLSSEEDVRKKGKKFARYQLGDLLLHLEKKHGEDWGKVYDEAWERIDKKVEGLSKHIKLEEERRSEDAQSKAALTDWLRAKASFVIEGLKEADKDEFCRCELKLQKWYGDLRGKPFAIEAENSILDISGFSKQYNCAFIWQKDGVKKLNLYLIINYFKGGKLRFKKIKPEAFEANRFYTVINKKSGEIVPMEVNFNFDDPNLIILPLAFGKRQGREFIWNDLLSLETGSLKLANGRVIEKTLYNRRTRQDEPALFVALTFERREVLDSSNIKPMNLIGVDRGENIPAVIALTDPEGCPLSRFKDSLGNPTHILRIGESYKEKQRTIQAKKEVEQRRAGGYSRKYASKAKNLADDMVRNTARDLLYYAVTQDAMLIFENLSRGFGRQGKRTFMAERQYTRMEDWLTAKLAYEGLPSKTYLSKTLAQYTSKTCSNCGFTITSADYDRVLEKLKKTATGWMTTINGKELKVEGQITYYNRYKRQNVVKDLSVELDRLSEESVNNDISSWTKGRSGEALSLLKKRFSHRPVQEKFVCLNCGFETHADEQAALNIARSWLFLRSQEYKKYQTNKTTGNTDKRAFVETWQSFYRKKLKEVWKPAV

SEQ ID NO: 2430 - protein, 978 aa, synthetic construct
QEIKRINKIRRRLVKDSNTKKAGKTGPMKTLLVRVMTPDLRERLENLRKKPENIPQPISNTSRANLNKLLTDYTEMKKAILHVYWEEFQKDPVGLMSRVAQPASKKIDQNKLKPEMDEKGNLTTAGFACSQCGQPLFVYKLEQVSEKGKAYTNYFGRCNVAEHEKLILLAQLKPEKDSDEAVTYSLGKFGQRALDFYSIHVTKESTHPVKPLAQIAGNRYASGPVGKALSDACMGTIASFLSKYQDIIIEHQKVVKGNQKRLESLRELAGKENLEYPSVTLPPQPHTKEGVDAYNEVIARVRMWVNLNLWQKLKLSRDDAKPLLRLKGFPSFPLVERQANEVDWWDMVCNVKKLINEKKEDGKVFWQNLAGYKRQEALRPYLSSEEDREKGKKFARYQLGDLLLHLEKKHGEDWGKVYDEAWERIDKKVEGLSKHIKLEEERRSEDAQSKAALTDWLRAKASFVIEGLKEADKDEFCRCELKLQKWYGDLRGKPFAIEAENSILDISGFSKQYNCAFIWQKDGVKKLNLYLIINYFKGGKLRFKKIKPEAFEANRFYTVINKKSGEIVPMEVNFNFDDPNLIILPLAFGKRQGREFIWNDLLSLETGSLKLANGRVIEKTLYNRRTRQDEPALFVALTFERREVLDSSNIKPMNLIGVDRGENIPAVIALTDPEGCPLSRFKDSLGNPTHILRIGESYKEKQRTIQAKKEVEQRRAGGYSRKYASKAKNLADDMVRNTARDLLYYAVTQDAMLIFENLSRGFGRQGKRTFMAERQYTRMEDWLTAKLAYEGLPSKTYLSKTLAQYTSKTCSNCGFTITSADYDRVLEKLKKTATGWMTTINGKELKVEGQITYYNRYKRQNVVKDLSVELDRLSEESVNNDISSWTKGRSGEALSLLKKRFSHRPVQEKFVCLNCGFETHADEQAALNIARSWLFLRSQEYKKYQTNKTTGNTDKRAFVETWQSFYRKKLKEVWKPAV

SEQ ID NO: 2431 - protein, 979 aa, synthetic construct
QEIKRINKIRRRLVKDSNTKKAGKTGPMKTLLVRVMTPDLRERLENLRKKPENIPQPISNTSRANLNKLLTDYTEMKKAILHVYWEEFQKDPVGLMSRVAQPASKKIDQNKLKPEMDEKGNLTTAGFACSQCGQPLFVYKLEQVSEKGKAYTNYFGRCNVAEHEKLILLAQLKPEKDSDEAVTYSLGKFGQRALDFYSIHVTKESTHPVKPLAQIAGNRYASGPVGKALSDACMGTIASFLSKYQDIIIEHQKVVKGNQKRLESLRELAGKENLEYPSVTLPPQPHTKEGVDAYNEVIARVRMWVNLNLWQKLKLSRDDAKPLLRLKGFPSFPLVERQANEVDWWDMVCNVKKLINEKKEDGKVFWQNLAGYKRQEALRPYLSSEEDRKKGKKFARYQLGDLLLHLEKKHGEDWGKVYDEAWERIDKKVEGLSKHIKLEEERRSEDAQSKAALTDWLRAKASFVIEGLKEADKDEMFCRCELKLQKWYGDLRGKPFAIEAENSILDISGFSKQYNCAFIWQKDGVKKLNLYLIINYFKGGKLRFKKIKPEAFEANRFYTVINKKSGEIVPMEVNFNFDDPNLIILPLAFGKRQGREFIWNDLLSLETGSLKLANGRVIEKTLYNRRTRQDEPALFVALTFERREVLDSSNIKPMNLIGVDRGENIPAVIALTDPEGCPLSRFKDSLGNPTHILRIGESYKEKQRTIQAKKEVEQRRAGGYSRKYASKAKNLADDMVRNTARDLLYYAVTQDAMLIFENLSRGFGRQGKRTFMAERQYTRMEDWLTAKLAYEGLPSKTYLSKTLAQYTSKTCSNCGFTITSADYDRVLEKLKKTATGWMTTINGKELKVEGQITYYNRYKRQNVVKDLSVELDRLSEESVNNDISSWTKGRSGEALSLLKKRFSHRPVQEKFVCLNCGFETHADEQAALNIARSWLFLRSQEYKKYQTNKTTGNTDKRAFVETWQSFYRKKLKEVWKPAV

SEQ ID NO: 2432 - protein, 978 aa, synthetic construct
QEIKRINKIRRRLVKDSNTKKAGKTGPMKTLLVRVMTPDLRERLENLRKKPENIPQPISNTSRANLNKLLTDYTEMKKAILHVYWEEFQKDPVGLMSRVAQPASKKIDQNKLKPEMDEKGNLTTAGFACSQCGQPLFVYKLEQVSEKGKAYTNYFGRCNVAEHEKLILLAQLKPEKDSDEAVTYSLGKFGQRALDFYSIHVTKESTHPVKPLAQIAGNRYASGPVGKALSDACMGTIASFLSKYQDIIIEHQKVVKGNQKRLESLRELAGKENLEYPSVTLPPQPHTKEGVDAYNEVIARVRMWVNLNLWQKLKLSRDDAKPLLRLKGFPSFPLVERQANEVDWWDMVCNVKKLINEKKEDGKVFWQNLAGYKRQEALRPYLSSEEDRKKGKKFARYQLGDLLLHLEKKHGEDWGKVYDEAWERIDKKVEGLSKHIKLEEERRSEDAQSKAALTDWLRAKASFVIEGLKEADKDEFCRCELKLQKWYGDLRGKPFAIEAENSILDISGFSKQYNCAFIWQKDGVKKQNLYLIINYFKGGKLRFKKIKPEAFEANRFYTVINKKSGEIVPMEVNFNFDDPNLIILPLAFGKRQGREFIWNDLLSLETGSLKLANGRVIEKTLYNRRTRQDEPALFVALTFERREVLDSSNIKPMNLIGVDRGENIPAVIALTDPEGCPLSRFKDSLGNPTHILRIGESYKEKQRTIQAKKEVEQRRAGGYSRKYASKAKNLADDMVRNTARDLLYYAVTQDAMLIFENLSRGFGRQGKRTFMAERQYTRMEDWLTAKLAYEGLPSKTYLSKTLAQYTSKTCSNCGFTITSADYDRVLEKLKKTATGWMTTINGKELKVEGQITYYNRYKRQNVVKDLSVELDRLSEESVNNDISSWTKGRSGEALSLLKKRFSHRPVQEKFVCLNCGFETHADEQAALNIARSWLFLRSQEYKKYQTNKTTGNTDKRAFVETWQSFYRKKLKEVWKPAV

SEQ ID NO: 2433 - protein, 978 aa, synthetic construct
QEIKRINKIRRRLVKDSNTKKAGKTGPMKTLLVRVMTPDLRERLENLRKKPENIPQPISNTSRANLNKLLTDYTEMKKAILHVYWEEFQKDPVGLMSRVAQPASKKIDQNKLKPEMDEKGNLTTAGFACSQCGQPLFVYKLEQVSEKGKAYTNYFGRCNVAEHEKLILLAQLKPEKDSDEAVTYSLGKFGQRALDFYSIHVTKESTHPVKPLAQIAGNRYASGPVGKALSDACMGTIASFLSKYQDIIIEHQKVVKGNQKRLESLRELAGKENLEYPSVTLPPQPHTKEGVDAYNEVIARVRMWVNLNLWQKLKLSRDDAKPLLRLKGFPSFPLVERQANEVDWWDMVCNVKKLINEKKEDGKVFWQNLAGYKRQEALRPYLSSEEDRKKGKKFARYQLGDLLLHLEKKHGEDWGKVYDEAWERIDKKVEGLSKHIKLEEERRSEDAQSKAALTDWLRAKASFVIEGLKEADKDEFCRCELKLQKWYGDLRGKPFAIEAENSILDISGFSKQYNCAFIWQKDGVKKLNLYLIINYFKGGKLRFKKIKPEAFEANRFYTVINKKSGEIVIMEVNFNFDDPNLIILPLAFGKRQGREFIWNDLLSLETGSLKLANGRVIEKTLYNRRTRQDEPALFVALTFERREVLDSSNIKPMNLIGVDRGENIPAVIALTDPEGCPLSRFKDSLGNPTHILRIGESYKEKQRTIQAKKEVEQRRAGGYSRKYASKAKNLADDMVRNTARDLLYYAVTQDAMLIFENLSRGFGRQGKRTFMAERQYTRMEDWLTAKLAYEGLPSKTYLSKTLAQYTSKTCSNCGFTITSADYDRVLEKLKKTATGWMTTINGKELKVEGQITYYNRYKRQNVVKDLSVELDRLSEESVNNDISSWTKGRSGEALSLLKKRFSHRPVQEKFVCLNCGFETHADEQAALNIARSWLFLRSQEYKKYQTNKTTGNTDKRAFVETWQSFYRKKLKEVWKPAV

SEQ ID NO: 2434 - protein, 978 aa, synthetic construct
QEIKRINKIRRRLVKDSNTKKAGKTGPMKTLLVRVMTPDLRERLENLRKKPENIPQPISNTSRANLNKLLTDYTEMKKAILHVYWEEFQKDPVGLMSRVAQPASKKIDQNKLKPEMDEKGNLTTAGFACSQCGQPLFVYKLEQVSEKGKAYTNYFGRCNVAEHEKLILLAQLKPEKDSDEAVTYSLGKFGQRALDFYSIHVTKESTHPVKPLAQIAGNRYASGPVGKALSDACMGTIASFLSKYQDIIIEHQKVVKGNQKRLESLRELAGKENLEYPSVTLPPQPHTKEGVDAYNEVIARVRMWVNLNLWQKLKLSRDDAKPLLRLKGFPSFPLVERQANEVDWWDMVCNVKKLINEKKEDGKVFWQNLAGYKRQEALRPYLSSEEDRKKGKKFARYQLGDLLLHLEKKHGEDWGKVYDEAWERIDKKVEGLSKHIKLEEERRSEDAQSKAALTDWLRAKASFVIEGLKEADKDEFCRCELKLQKWYGDLRGKPFAIEAENSILDISGFSKQYNCAFIWQKDGVKKLNLYLIINYFKGGKLRFKKIKPEAFEANRFYTVINKKSGEIVPMEVNFNFDDPNLIILPLAFGKRQGREFIWNDLLSLETGSLKLANGRVIEKTLYNRRTRQDEPALFVALTFERREVNDSSNIKPMNLIGVDRGENIPAVIALTDPEGCPLSRFKDSLGNPTHILRIGESYKEKQRTIQAKKEVEQRRAGGYSRKYASKAKNLADDMVRNTARDLLYYAVTQDAMLIFENLSRGFGRQGKRTFMAERQYTRMEDWLTAKLAYEGLPSKTYLSKTLAQYTSKTCSNCGFTITSADYDRVLEKLKKTATGWMTTINGKELKVEGQITYYNRYKRQNVVKDLSVELDRLSEESVNNDISSWTKGRSGEALSLLKKRFSHRPVQEKFVCLNCGFETHADEQAALNIARSWLFLRSQEYKKYQTNKTTGNTDKRAFVETWQSFYRKKLKEVWKPAV

SEQ ID NO: 2435 - protein, 979 aa, synthetic construct
QEIKRINKIRRRLVKDSNTKKAGKTGPMKTLLVRVMTPDLRERLENLRKKPENIPQPISNTSRANLNKLLTDYTEMKKAILHVYWEEFQKDPVGLMSRVAQPASKKIDQNKLKPEMDEKGNLTTAGFACSQCGQPLFVYKLEQVSEKGKAYTNYFGRCNVAEHEKLILLAQLKPEKDSDEAVTYSLGKFGQRALDFYSIHVTKESTHPVKPLAQIAGNRYASGPVGKALSDACMGTIASFLSKYQDIIIEHQKVVKGNQKRLESLRELAGKENLEYPSVTLPPQPHTKEGVDAYNEVIARVRMWVNLNLWQKLKLSRDDAKPLLRLKGFPSFPLVERQANEVDWWDMVCNVKKLINEKKEDGKVFWQNLAGYKRQEALRPYLSSEEDRKKGKKFARYQLGDLLLHLEKKHGEDWGKVYDEAWERIDKKVEGLSKHIKLEEERRSEDAQSKAALTDWLRAKASFVIEGLKEADKDEFCRCELKLQKWYGDLRGKPFAIEAENSILDISGFSKQYNCAFIWQKDGVKKLNLYLIINYFKGGKLRFKKIKPEAFEANRFYTVINKKSGEIVPMEVNFNFDDPNLIILPLAFGKRQGREFIWNDLLSLETGSLKLANGRVIEKTLYNRRTRQDEPALFVALTFERREVLDSSNIKPMNLIGVDRGENIPAVIALTDPEGCPLSRFKDSLGNPTHILRIGESYKEKQRTIQAKKEVEQRRAGGYSRKYASKAKNLADDMVRNTARDLLYYAVTQDAMLIFENLSRGFGRQGKRTFMAERQYTRMEDWLTAKLAYEGLPSGKTYLSKTLAQYTSKTCSNCGFTITSADYDRVLEKLKKTATGWMTTINGKELKVEGQITYYNRYKRQNVVKDLSVELDRLSEESVNNDISSWTKGRSGEALSLLKKRFSHRPVQEKFVCLNCGFETHADEQAALNIARSWLFLRSQEYKKYQTNKTTGNTDKRAFVETWQSFYRKKLKEVWKPAV

SEQ ID NO: 2436 - protein, 978 aa, synthetic construct
QEIKRINKIRRRLVKDSNTKKAGKTGPMKTLLVRVMTPDLRERLENLRKKPENIPQPISNTSRANLNKLLTDYTEMKKAILHVYWEEFQKDPVGLMSRVAQPASKKIDQNKLKPEMDEKGNLTTAGFACSQCGQPLFVYKLEQVSEKGKAYTNYFGRCNVAEHEKLILLAQLKPEKDSDEAVTYSLGKFGQRALDFYSIHVTKESTHPVKPLAQIAGNRYASGPVGKALSDACMGTIASFLSKYQDIIIEHQKVVKGNQKRLESLRELAGKENLEYPSVTLPPQPHTKEGVDAYNEVIARVRMWVNLNLWQKLKLSRDDAKPLLRLKGFPSFPLVERQANEVDWWDMVCNVKKLINEKKEDGKVFWQNLAGYKRQEALRPYLSSEEDRKKGKKFARYQLGDLLLHLEKKHGEDWGKVYDEAWERIDKKVEGLSKHIKLEEERRSEDAQSKAALTDWLRAKASFVIEGLKEADKDEFCRCELKLQKWYGDLRGKPFAIEAENSILDISGFSKQYNCAFIWQKDGVKKLNLYLIINYFKGGKLRFKKIKPEAFEANRFYTVINKKSGEIVPMEVNFNFDDPNLIILPLAFGKRQGREFIWNDLLSLETGSLKLANGRVIEKTLYNRRTRQDEPALFVALTFERREVLDSSNIKPMNLIGVDRGENIPAVIALTDPEGCPLSRFKDSLGNPTHILRIGESYKEKQRTIQAKKEVEQRRAGGYSRKYASKAKNLADDMVRNTARDLLYYAVTQDAMLIFENLSRGFGRQGKRTFMAERQYTRMEDWLTAKLAYEGLPSKTYLSKTLAQYTSKTCSNCGFTITSADYDRMLEKLKKTATGWMTTINGKELKVEGQITYYNRYKRQNVVKDLSVELDRLSEESVNNDISSWTKGRSGEALSLLKKRFSHRPVQEKFVCLNCGFETHADEQAALNIARSWLFLRSQEYKKYQTNKTTGNTDKRAFVETWQSFYRKKLKEVWKPAV

SEQ ID NO: 2437 - protein, 978 aa, synthetic construct
QEIKRINKIRRRLVKDSNTKKAGKTGPMKTLLVRVMTPDLRERLENLRKKPENIPQPISNTSRANLNKLLTDYTEMKKAILHVYWEEFQKDPVGLMSRVAQPASKKIDQNKLKPEMDEKGNLTTAGFACSQCGQPLFVYKLEQVSEKGKAYTNYFGRCNVAEHEKLILLAQLKPEKDSDEAVTYSLGKFGQRALDFYSIHVTKESTHPVKPLAQIAGNRYASGPVGKALSDACMGTIASFLSKYQDIIIEHQKVVKGNQKRLESLRELAGKENLEYPSVTLPPQPHTKEGVDAYNEVIARVRMWVNLNLWQKLKLSRDDAKPLLRLKGFPSFPLVERQANEVDWWDMVCNVKKLINEKKEDGKVFWQNLAGYKRQEALRPYLSSEEDRKKGKKFARYQLGDLLLHLEKKHGEDWGKVYDEAWERIDKKVEGLSKHIKLEEERRSEDAQSKAALTDWLRAKASFVIEGLKEADKDEFCRCELKLQKWYGDLRGKPFAIEAENSILDISGFSKQYNCAFIWQKDGVKKLNLYLIINYFKGGKLRFKKIKPEAFEANRFYTVINKKSGEIVPMEVNFNFDDPNLIILPLAFGKRQGREFIWNDLLSLETGSLKLANGRVIEKTLYNRRTRQDEPALFVALTFERREVLDSSNIKPMNLIGVDRGENIPAVIALTDPEGCPLSRFKDSLGNPTHILRIGESYKEKQRTIQAKKEVEQRRAGGYSRKYASKAKNLADDMVRNTARDLLYYAVTQDAMLIFENLSRGFGRQGKRTFMAERQYTRMEDWLTAKLAYEGLPSKTYLSKTLAQYTSKTCSNCGFTITSADYDRVLEKLKKTATGWMTTINGKELKVEGQITYYNRYKRQNVVKDLSVELDRLSEESVNNDISSWTKGRQGEALSLLKKRFSHRPVQEKFVCLNCGFETHADEQAALNIARSWLFLRSQEYKKYQTNKTTGNTDKRAFVETWQSFYRKKLKEVWKPAV

SEQ ID NO: 2438 - protein, 978 aa, synthetic construct
QEIKRINKIRRRLVKDSNTKKAGKTGPMKTLLVRVMTPDLRERLENLRKKPENIPQPISNTSRANLNKLLTDYTEMKKAILHVYWEEFQKDPVGLMSRVAQPASKKIDQNKLKPEMDEKGNLTTAGFACSQCGQPLFVYKLEQVSEKGKAYTNYFGRCNVAEHEKLILLAQLKPEKDSDEAVTYSLGKFGQRALDFYSIHVTKESTHPVKPLAQIAGNRYASGPVGKALSDACMGTIASFLSKYQDIIIEHQKVVKGNQKRLESLRELAGKENLEYPSVTLPPQPHTKEGVDAYNEVIARVRMWVNLNLWQKLKLSRDDAKPLLRLKGFPSFPLVERQANEVDWWDMVCNVKKLINEKKEDGKVFWQNLAGYKRQEALRPYLSSEEDRKKGKKFARYQLGDLLLHLEKKHGEDWGKVYDEAWERIDKKVEGLSKHIKLEEERRSEDAQSKAALTDWLRAKASFVIEGLKEADKDEFCRCELKLQKWYGDLRGKPFAIEAENSILDISGFSKQYNCAFIWQKDGVKKLNLYLIINYFKGGKLRFKKIKPEAFEANRFYTVINKKSGEIVPMEVNFNFDDPNLIILPLAFGKRQGREFIWNDLLSLETGSLKLANGRVIEKTLYNRRTRQDEPALFVALTFERREVLDSSNIKPMNLIGVDRGENIPAVIALTDPEGCPLSRFKDSLGNPTHILRIGESYKEKQRTIQAKKEVEQRRAGGYSRKYASKAKNLADDMVRNTARDLLYYAVTQDAMLIFENLSRGFGRQGKRTFMAERQYTRMEDWLTAKLAYEGLPSKTYLSKTLAQYTSKTCSNCGFTITSADYDRVLEKLKKTATGWMTTINGKELKVEGQITYYNRYKRQNVVKDLSVELDRLSEESVNNDISSWTKGRSGEALSLLKKRFSHRPVQEKFVCLNCEFETHADEQAALNIARSWLFLRSQEYKKYQTNKTTGNTDKRAFVETWQSFYRKKLKEVWKPAV

SEQ ID NO: 2439 - protein, 979 aa, synthetic construct
QEIKRINKIRRRLVKDSNTKKAGKTGPMKTLLVRVMTPDLRERLENLRKKPENIPQPISNTSRANLNKLLTDYTEMKKAILHVYWEEFQKDPVGLMSRVAQPASKKIDQNKLKPEMDEKGNLTTAGFACSQCGQPLFVYKLEQVSEKGKAYTNYFGRCNVAEHEKLILLAQLKPEKDSDEAVTYSLGKFGQRALDFYSIHVTKESTHPVKPLAQIAGNRYASGPVGKALSDACMGTIASFLSKYQDIIIEHQKVVKGNQKRLESLRELAGKENLEYPSVTLPPQPHTKEGVDAYNEVIARVRMWVNLNLWQKLKLSRDDAKPLLRLKGFPSFPLVERQANEVDWWDMVCNVKKLINEKKEDGKVFWQNLAGYKRQEALRPYLSSEEDRKKGKKFARYQLGDLLLHLEKKHGEDWGKVYDEAWERIDKKVEGLSKHIKLEEERRSEDAQSKAALTDWLRAKASFVIEGLKEADKDEFCRCELKLQKWYGDLRGKPFAIEAENSILDISGFSKQYNCAFIWQKDGVKKLNLYLIINYFKGGKLRFKKIKPEAFEANRFYTVINKKSGEIVPMEVNFNFDDPNLIILPLAFGKRQGREFIWNDLLSLETGSLKLANGRVIEKTLYNRRTRQDEPALFVALTFERREVLDSSNIKPMNLIGVDRGENIPAVIALTDPEGCPLSRFKDSLGNPTHILRIGESYKEKQRTIQAKKEVEQRRAGGYSRKYASKAKNLADDMVRNTARDLLYYAVTQDAMLIFENLSRGFGRQGKRTFMAERQYTRMEDWLTAKLAYEGLPSKTYLSKTLAQYTSKTCSNCGFTITSADYDRVLEKLKKTATGWMTTINGKELKVEGQITYYNRYKRQNVVKDLSVELDRLSEESVNNDISSWTKGRSGEALSLLKKRFSHRPVQEKFVCLNCGFETHADEQAALNIARSWLFLRSQEYKKYQTNKTSTGNTDKRAFVETWQSFYRKKLKEVWKPAV

SEQ ID NO: 2440 - protein, 979 aa, synthetic construct
QEIKRINKIRRRLVKDSNTKKAGKTGPMKTLLVRVMTPDLRERLENLRKKPENIPQPISNTSRANLNKLLTDYTEMKKAILHVYWEEFQKDPVGLMSRVAQPASKKIDQNKLKPEMDEKGNLTTAGFACSQCGQPLFVYKLEQVSEKGKAYTNYFGRCNVAEHEKLILLAQLKPEKDSDEAVTYSLGKFGQRALDFYSIHVTKESTHPVKPLAQIAGNRYASGPVGKALSDACMGTIASFLSKYQDIIIEHQKVVKGNQKRLESLRELAGKENLEYPSVTLPPQPHTKEGVDAYNEVIARVRMWVNLNLWQKLKLSRDDAKPLLRLKGFPSFPLVERQANEVDWWDMVCNVKKLINEKKEDGKVFWQNLAGYKRQEALRPYLSSEEDRKKGKKFARYQLGDLLLHLEKKHGEDWGKVYDEAWERIDKKVEGLSKHIKLEEERRSEDAQSKAALTDWLRAKASFVIEGLKEADKDEFCRCELKLQKWYGDLRGKPFAIEAENSILDISGFSKQYNCAFIWQKDGVKKLNLYLIINYFKGGKLRFKKIKPEAFEANRFYTVINKKSGEIVPMEVNFNFDDPNLIILPLAFGKRQGREFIWNDLLSLETGSLKLANGRVIEKTLYNRRTRQDEPALFVALTFERREVLDSSNIKPMNLIGVDRGENIPAVIALTDPEGCPLSRFKDSLGNPTHILRIGESYKEKQRTIQAKKEVEQRRAGGYSRKYASKAKNLADDMVRNTARDLLYYAVTQDAMLIFENLSRGFGRQGKRTFMAERQYTRMEDWLTAKLAYEGLPSKTYLSKTLAQYTSKTCSNCGFTITSADYDRVLEKLKKTATGWMTTINGKELKVEGQITYYNRYKRQNVVKDLSVELDRLSEESVNNDISSWTKGRSGEALSLLKKRFSHRPVQEKFVCLNCGFETHADEQAALNIARSWLFLRSQEYKKYQTNKTTGKNTDKRAFVETWQSFYRKKLKEVWKPAV

SEQ ID NO: 2441 - protein, 979 aa, synthetic construct
QEIKRINKIRRRLVKDSNTKKAGKTGPMKTLLVRVMTPDLRERLENLRKKPENIPQPISNTSRANLNKLLTDYTEMKKAILHVYWEEFQKDPVGLMSRVAGQPASKKIDQNKLKPEMDEKGNLTTAGFACSQCGQPLFVYKLEQVSEKGKAYTNYFGRCNVAEHEKLILLAQLKPEKDSDEAVTYSLGKFGQRALDFYSIHVTKESTHPVKPLAQIAGNRYASGPVGKALSDACMGTIASFLSKYQDIIIEHQKVVKGNQKRLESLRELAGKENLEYPSVTLPPQPHTKEGVDAYNEVIARVRMWVNLNLWQKLKLSRDDAKPLLRLKGFPSFPLVERQANEVDWWDMVCNVKKLINEKKEDGKVFWQNLAGYKRQEALRPYLSSEEDRKKGKKFARYQLGDLLLHLEKKHGEDWGKVYDEAWERIDKKVEGLSKHIKLEEERRSEDAQSKAALTDWLRAKASFVIEGLKEADKDEFCRCELKLQKWYGDLRGKPFAIEAENSILDISGFSKQYNCAFIWQKDGVKKLNLYLIINYFKGGKLRFKKIKPEAFEANRFYTVINKKSGEIVPMEVNFNFDDPNLIILPLAFGKRQGREFIWNDLLSLETGSLKLANGRVIEKTLYNRRTRQDEPALFVALTFERREVLDSSNIKPMNLIGVDRGENIPAVIALTDPEGCPLSRFKDSLGNPTHILRIGESYKEKQRTIQAKKEVEQRRAGGYSRKYASKAKNLADDMVRNTARDLLYYAVTQDAMLIFENLSRGFGRQGKRTFMAERQYTRMEDWLTAKLAYEGLPSKTYLSKTLAQYTSKTCSNCGFTITSADYDRVLEKLKKTATGWMTTINGKELKVEGQITYYNRYKRQNVVKDLSVELDRLSEESVNNDISSWTKGRSGEALSLLKKRFSHRPVQEKFVCLNCGFETHADEQAALNIARSWLFLRSQEYKKYQTNKTTGNTDKRAFVETWQSFYRKKLKEVWKPAV

SEQ ID NO: 2442 - protein, 979 aa, synthetic construct
QEIKRINKIRRRLVKDSNTKKAGKTGPMKTLLVRVMTPDLRERLENLRKKPENIPQPISNTSRANLNKLLTDYTEMKKAILHVYWEEFQKDPVGLMSRVAQPIASKKIDQNKLKPEMDEKGNLTTAGFACSQCGQPLFVYKLEQVSEKGKAYTNYFGRCNVAEHEKLILLAQLKPEKDSDEAVTYSLGKFGQRALDFYSIHVTKESTHPVKPLAQIAGNRYASGPVGKALSDACMGTIASFLSKYQDIIIEHQKVVKGNQKRLESLRELAGKENLEYPSVTLPPQPHTKEGVDAYNEVIARVRMWVNLNLWQKLKLSRDDAKPLLRLKGFPSFPLVERQANEVDWWDMVCNVKKLINEKKEDGKVFWQNLAGYKRQEALRPYLSSEEDRKKGKKFARYQLGDLLLHLEKKHGEDWGKVYDEAWERIDKKVEGLSKHIKLEEERRSEDAQSKAALTDWLRAKASFVIEGLKEADKDEFCRCELKLQKWYGDLRGKPFAIEAENSILDISGFSKQYNCAFIWQKDGVKKLNLYLIINYFKGGKLRFKKIKPEAFEANRFYTVINKKSGEIVPMEVNFNFDDPNLIILPLAFGKRQGREFIWNDLLSLETGSLKLANGRVIEKTLYNRRTRQDEPALFVALTFERREVLDSSNIKPMNLIGVDRGENIPAVIALTDPEGCPLSRFKDSLGNPTHILRIGESYKEKQRTIQAKKEVEQRRAGGYSRKYASKAKNLADDMVRNTARDLLYYAVTQDAMLIFENLSRGFGRQGKRTFMAERQYTRMEDWLTAKLAYEGLPSKTYLSKTLAQYTSKTCSNCGFTITSADYDRVLEKLKKTATGWMTTINGKELKVEGQITYYNRYKRQNVVKDLSVELDRLSEESVNNDISSWTKGRSGEALSLLKKRFSHRPVQEKFVCLNCGFETHADEQAALNIARSWLFLRSQEYKKYQTNKTTGNTDKRAFVETWQSFYRKKLKEVWKPAV

SEQ ID NO: 2443 - protein, 979 aa, synthetic construct
QEIKRINKIRRRLVKDSNTKKAGKTGPMKTLLVRVMTPDLRERLENLRKKPENIPQPISNTSRANLNKLLTDYTEMKKAILHVYWEEFQKDPVGLMSRVAQPALSKKIDQNKLKPEMDEKGNLTTAGFACSQCGQPLFVYKLEQVSEKGKAYTNYFGRCNVAEHEKLILLAQLKPEKDSDEAVTYSLGKFGQRALDFYSIHVTKESTHPVKPLAQIAGNRYASGPVGKALSDACMGTIASFLSKYQDIIIEHQKVVKGNQKRLESLRELAGKENLEYPSVTLPPQPHTKEGVDAYNEVIARVRMWVNLNLWQKLKLSRDDAKPLLRLKGFPSFPLVERQANEVDWWDMVCNVKKLINEKKEDGKVFWQNLAGYKRQEALRPYLSSEEDRKKGKKFARYQLGDLLLHLEKKHGEDWGKVYDEAWERIDKKVEGLSKHIKLEEERRSEDAQSKAALTDWLRAKASFVIEGLKEADKDEFCRCELKLQKWYGDLRGKPFAIEAENSILDISGFSKQYNCAFIWQKDGVKKLNLYLIINYFKGGKLRFKKIKPEAFEANRFYTVINKKSGEIVPMEVNFNFDDPNLIILPLAFGKRQGREFIWNDLLSLETGSLKLANGRVIEKTLYNRRTRQDEPALFVALTFERREVLDSSNIKPMNLIGVDRGENIPAVIALTDPEGCPLSRFKDSLGNPTHILRIGESYKEKQRTIQAKKEVEQRRAGGYSRKYASKAKNLADDMVRNTARDLLYYAVTQDAMLIFENLSRGFGRQGKRTFMAERQYTRMEDWLTAKLAYEGLPSKTYLSKTLAQYTSKTCSNCGFTITSADYDRVLEKLKKTATGWMTTINGKELKVEGQITYYNRYKRQNVVKDLSVELDRLSEESVNNDISSWTKGRSGEALSLLKKRFSHRPVQEKFVCLNCGFETHADEQAALNIARSWLFLRSQEYKKYQTNKTTGNTDKRAFVETWQSFYRKKLKEVWKPAV

SEQ ID NO: 2444 - protein, 979 aa, synthetic construct
QEIKRINKIRRRLVKDSNTKKAGKTGPMKTLLVRVMTPDLRERLENLRKKPENIPQPISNTSRANLNKLLTDYTEMKKAILHVYWEEFQKDPVGLMSRVAQPASKKIDQNKLKPEMDEKGNLTTAGFACSQCGQPLFVYKLEQVSEKGKAYTNYFGRCNVAEHEKLILLAQLKPEKDSDEAVTYSLGKFGQRALDFYSIHVTKESTHPVKPLAQIAGNRYASGPVGKALSDACMGTIASFLSKYQDIIIEHQKVVKGNQKRLESLRELAGKENLEYPSVTLPPQPHTKEGVDAYNEVIARVRMWVNLNLWQKLKLSRDDAKPLLRLKGFPSFPDLVERQANEVDWWDMVCNVKKLINEKKEDGKVFWQNLAGYKRQEALRPYLSSEEDRKKGKKFARYQLGDLLLHLEKKHGEDWGKVYDEAWERIDKKVEGLSKHIKLEEERRSEDAQSKAALTDWLRAKASFVIEGLKEADKDEFCRCELKLQKWYGDLRGKPFAIEAENSILDISGFSKQYNCAFIWQKDGVKKLNLYLIINYFKGGKLRFKKIKPEAFEANRFYTVINKKSGEIVPMEVNFNFDDPNLIILPLAFGKRQGREFIWNDLLSLETGSLKLANGRVIEKTLYNRRTRQDEPALFVALTFERREVLDSSNIKPMNLIGVDRGENIPAVIALTDPEGCPLSRFKDSLGNPTHILRIGESYKEKQRTIQAKKEVEQRRAGGYSRKYASKAKNLADDMVRNTARDLLYYAVTQDAMLIFENLSRGFGRQGKRTFMAERQYTRMEDWLTAKLAYEGLPSKTYLSKTLAQYTSKTCSNCGFTITSADYDRVLEKLKKTATGWMTTINGKELKVEGQITYYNRYKRQNVVKDLSVELDRLSEESVNNDISSWTKGRSGEALSLLKKRFSHRPVQEKFVCLNCGFETHADEQAALNIARSWLFLRSQEYKKYQTNKTTGNTDKRAFVETWQSFYRKKLKEVWKPAV

SEQ ID NO: 2445 - protein, 979 aa, synthetic construct
QEIKRINKIRRRLVKDSNTKKAGKTGPMKTLLVRVMTPDLRERLENLRKKPENIPQPISNTSRANLNKLLTDYTEMKKAILHVYWEEFQKDPVGLMSRVAQPASKKIDQNKLKPEMDEKGNLTTAGFACSQCGQPLFVYKLEQVSEKGKAYTNYFGRCNVAEHEKLILLAQLKPEKDSDEAVTYSLGKFGQRALDFYSIHVTKESTHPVKPLAQIAGNRYASGPVGKALSDACMGTIASFLSKYQDIIIEHQKVVKGNQKRLESLRELAGKENLEYPSVTLPPQPHTKEGVDAYNEVIARVRMWVNLNLWQKLKLSRDDAKPLLRLKGFPSFHPLVERQANEVDWWDMVCNVKKLINEKKEDGKVFWQNLAGYKRQEALRPYLSSEEDRKKGKKFARYQLGDLLLHLEKKHGEDWGKVYDEAWERIDKKVEGLSKHIKLEEERRSEDAQSKAALTDWLRAKASFVIEGLKEADKDEFCRCELKLQKWYGDLRGKPFAIEAENSILDISGFSKQYNCAFIWQKDGVKKLNLYLIINYFKGGKLRFKKIKPEAFEANRFYTVINKKSGEIVPMEVNFNFDDPNLIILPLAFGKRQGREFIWNDLLSLETGSLKLANGRVIEKTLYNRRTRQDEPALFVALTFERREVLDSSNIKPMNLIGVDRGENIPAVIALTDPEGCPLSRFKDSLGNPTHILRIGESYKEKQRTIQAKKEVEQRRAGGYSRKYASKAKNLADDMVRNTARDLLYYAVTQDAMLIFENLSRGFGRQGKRTFMAERQYTRMEDWLTAKLAYEGLPSKTYLSKTLAQYTSKTCSNCGFTITSADYDRVLEKLKKTATGWMTTINGKELKVEGQITYYNRYKRQNVVKDLSVELDRLSEESVNNDISSWTKGRSGEALSLLKKRFSHRPVQEKFVCLNCGFETHADEQAALNIARSWLFLRSQEYKKYQTNKTTGNTDKRAFVETWQSFYRKKLKEVWKPAV

SEQ ID NO: 2446 - protein, 979 aa, synthetic construct
QEIKRINKIRRRLVKDSNTKKAGKTGPMKTLLVRVMTPDLRERLENLRKKPENIPQPISNTSRANLNKLLTDYTEMKKAILHVYWEEFQKDPVGLMSRVAQPASKKIDQNKLKPEMDEKGNLTTAGFACSQCGQPLFVYKLEQVSEKGKAYTNYFGRCNVAEHEKLILLAQLKPEKDSDEAVTYSLGKFGQRALDFYSIHVTKESTHPVKPLAQIAGNRYASGPVGKALSDACMGTIASFLSKYQDIIIEHQKVVKGNQKRLESLRELAGKENLEYPSVTLPPQPHTKEGVDAYNEVIARVRMWVNLNLWQKLKLSRDDAKPLLRLKGFPSFPLVERQANEVDQWWDMVCNVKKLINEKKEDGKVFWQNLAGYKRQEALRPYLSSEEDRKKGKKFARYQLGDLLLHLEKKHGEDWGKVYDEAWERIDKKVEGLSKHIKLEEERRSEDAQSKAALTDWLRAKASFVIEGLKEADKDEFCRCELKLQKWYGDLRGKPFAIEAENSILDISGFSKQYNCAFIWQKDGVKKLNLYLIINYFKGGKLRFKKIKPEAFEANRFYTVINKKSGEIVPMEVNFNFDDPNLIILPLAFGKRQGREFIWNDLLSLETGSLKLANGRVIEKTLYNRRTRQDEPALFVALTFERREVLDSSNIKPMNLIGVDRGENIPAVIALTDPEGCPLSRFKDSLGNPTHILRIGESYKEKQRTIQAKKEVEQRRAGGYSRKYASKAKNLADDMVRNTARDLLYYAVTQDAMLIFENLSRGFGRQGKRTFMAERQYTRMEDWLTAKLAYEGLPSKTYLSKTLAQYTSKTCSNCGFTITSADYDRVLEKLKKTATGWMTTINGKELKVEGQITYYNRYKRQNVVKDLSVELDRLSEESVNNDISSWTKGRSGEALSLLKKRFSHRPVQEKFVCLNCGFETHADEQAALNIARSWLFLRSQEYKKYQTNKTTGNTDKRAFVETWQSFYRKKLKEVWKPAV

SEQ ID NO: 2447 - protein, 978 aa, synthetic construct
QEIKRINKIRRRLVKDSNTKKAGKTGPMKTLLVRVMTPDLRERLENLRKKPENIPQPISNTSRANLNKLLTDYTEMKKAILHVYWEEFQKDPVGLMSRVAQPASKKIDQNKLKPEMDEKGNLTTAGFACSQCGQPLFVYKLEQVSEKGKAYTNYFGRCNVAEHEKLILLAQLKPEKDSDEAVTYSLGKFGQRALDFYSIHVTKESTHPVKPLAQIAGNRYASGPVGKALSDACMGTIASFLSKYQDIIIEHQKVVKGNQKRLESLRELAGKENLEYPSVTLPPQPHTKEGVDAYNEVIARVRMWVNLNLWQKLKLSRDDAKPLLRLKGFPSFPLPERQANEVDWWDMVCNVKKLINEKKEDGKVFWQNLAGYKRQEALRPYLSSEEDRKKGKKFARYQLGDLLLHLEKKHGEDWGKVYDEAWERIDKKVEGLSKHIKLEEERRSEDAQSKAALTDWLRAKASFVIEGLKEADKDEFCRCELKLQKWYGDLRGKPFAIEAENSILDISGFSKQYNCAFIWQKDGVKKLNLYLIINYFKGGKLRFKKIKPEAFEANRFYTVINKKSGEIVPMEVNFNFDDPNLIILPLAFGKRQGREFIWNDLLSLETGSLKLANGRVIEKTLYNRRTRQDEPALFVALTFERREVLDSSNIKPMNLIGVDRGENIPAVIALTDPEGCPLSRFKDSLGNPTHILRIGESYKEKQRTIQAKKEVEQRRAGGYSRKYASKAKNLADDMVRNTARDLLYYAVTQDAMLIFENLSRGFGRQGKRTFMAERQYTRMEDWLTAKLAYEGLPSKTYLSKTLAQYTSKTCSNCGFTITSADYDRVLEKLKKTATGWMTTINGKELKVEGQITYYNRYKRQNVVKDLSVELDRLSEESVNNDISSWTKGRSGEALSLLKKRFSHRPVQEKFVCLNCGFETHADEQAALNIARSWLFLRSQEYKKYQTNKTTGNTDKRAFVETWQSFYRKKLKEVWKPAV

SEQ ID NO: 2448 - protein, 978 aa, synthetic construct
QEIKRINKIRRRLVKDSNTKKAGKTGPMKTLLVRVMTPDLRERLENLRKKPENIPQPISNTSRANLNKLLTDYTEMKKAILHVYWEEFQKDPVGLMSRVAQPASKKIDQNKLKPEMDEKGNLTTAGFACSQCGQPLFVYKLEQVSEKGKAYTNYFGRCNVAEHEKLIDLAQLKPEKDSDEAVTYSLGKFGQRALDFYSIHVTKESTHPVKPLAQIAGNRYASGPVGKALSDACMGTIASFLSKYQDIIIEHQKVVKGNQKRLESLRELAGKENLEYPSVTLPPQPHTKEGVDAYNEVIARVRMWVNLNLWQKLKLSRDDAKPLLRLKGFPSFPLVERQANEVDWWDMVCNVKKLINEKKEDGKVFWQNLAGYKRQEALRPYLSSEEDRKKGKKFARYQLGDLLLHLEKKHGEDWGKVYDEAWERIDKKVEGLSKHIKLEEERRSEDAQSKAALTDWLRAKASFVIEGLKEADKDEFCRCELKLQKWYGDLRGKPFAIEAENSILDISGFSKQYNCAFIWQKDGVKKLNLYLIINYFKGGKLRFKKIKPEAFEANRFYTVINKKSGEIVPMEVNFNFDDPNLIILPLAFGKRQGREFIWNDLLSLETGSLKLANGRVIEKTLYNRRTRQDEPALFVALTFERREVLDSSNIKPMNLIGVDRGENIPAVIALTDPEGCPLSRFKDSLGNPTHILRIGESYKEKQRTIQAKKEVEQRRAGGYSRKYASKAKNLADDMVRNTARDLLYYAVTQDAMLIFENLSRGFGRQGKRTFMAERQYTRMEDWLTAKLAYEGLPSKTYLSKTLAQYTSKTCSNCGFTITSADYDRVLEKLKKTATGWMTTINGKELKVEGQITYYNRYKRQNVVKDLSVELDRLSEESVNNDISSWTKGRSGEALSLLKKRFSHRPVQEKFVCLNCGFETHADEQAALNIARSWLFLRSQEYKKYQTNKTTGNTDKRAFVETWQSFYRKKLKEVWKPAV

SEQ ID NO: 2449 - protein, 978 aa, synthetic construct
QEIKRINKIRRRLVKDSNTKKAGKTGPMKTLLVRVMTPDLRERLENLRKKPENIPQPISNTSRANLNKLLTDYTEMKKAILHVYWEEFQKDPVGLMSRVAQPASKKIDQNKLKPEMDEKGNLTTAGFACSQCGQPLFVYKLEQVSEKGKAYTNYFGRCNVAEHEKLIELAQLKPEKDSDEAVTYSLGKFGQRALDFYSIHVTKESTHPVKPLAQIAGNRYASGPVGKALSDACMGTIASFLSKYQDIIIEHQKVVKGNQKRLESLRELAGKENLEYPSVTLPPQPHTKEGVDAYNEVIARVRMWVNLNLWQKLKLSRDDAKPLLRLKGFPSFPLVERQANEVDWWDMVCNVKKLINEKKEDGKVFWQNLAGYKRQEALRPYLSSEEDRKKGKKFARYQLGDLLLHLEKKHGEDWGKVYDEAWERIDKKVEGLSKHIKLEEERRSEDAQSKAALTDWLRAKASFVIEGLKEADKDEFCRCELKLQKWYGDLRGKPFAIEAENSILDISGFSKQYNCAFIWQKDGVKKLNLYLIINYFKGGKLRFKKIKPEAFEANRFYTVINKKSGEIVPMEVNFNFDDPNLIILPLAFGKRQGREFIWNDLLSLETGSLKLANGRVIEKTLYNRRTRQDEPALFVALTFERREVLDSSNIKPMNLIGVDRGENIPAVIALTDPEGCPLSRFKDSLGNPTHILRIGESYKEKQRTIQAKKEVEQRRAGGYSRKYASKAKNLADDMVRNTARDLLYYAVTQDAMLIFENLSRGFGRQGKRTFMAERQYTRMEDWLTAKLAYEGLPSKTYLSKTLAQYTSKTCSNCGFTITSADYDRVLEKLKKTATGWMTTINGKELKVEGQITYYNRYKRQNVVKDLSVELDRLSEESVNNDISSWTKGRSGEALSLLKKRFSHRPVQEKFVCLNCGFETHADEQAALNIARSWLFLRSQEYKKYQTNKTTGNTDKRAFVETWQSFYRKKLKEVWKPAV

SEQ ID NO: 2450 - protein, 979 aa, synthetic construct
QEIKRINKIRRRLVKDSNTKKAGKTPGPMKTLLVRVMTPDLRERLENLRKKPENIPQPISNTSRANLNKLLTDYTEMKKAILHVYWEEFQKDPVGLMSRVAQPASKKIDQNKLKPEMDEKGNLTTAGFACSQCGQPLFVYKLEQVSEKGKAYTNYFGRCNVAEHEKLILLAQLKPEKDSDEAVTYSLGKFGQRALDFYSIHVTKESTHPVKPLAQIAGNRYASGPVGKALSDACMGTIASFLSKYQDIIIEHQKVVKGNQKRLESLRELAGKENLEYPSVTLPPQPHTKEGVDAYNEVIARVRMWVNLNLWQKLKLSRDDAKPLLRLKGFPSFPLVERQANEVDWWDMVCNVKKLINEKKEDGKVFWQNLAGYKRQEALRPYLSSEEDRKKGKKFARYQLGDLLLHLEKKHGEDWGKVYDEAWERIDKKVEGLSKHIKLEEERRSEDAQSKAALTDWLRAKASFVIEGLKEADKDEFCRCELKLQKWYGDLRGKPFAIEAENSILDISGFSKQYNCAFIWQKDGVKKLNLYLIINYFKGGKLRFKKIKPEAFEANRFYTVINKKSGEIVPMEVNFNFDDPNLIILPLAFGKRQGREFIWNDLLSLETGSLKLANGRVIEKTLYNRRTRQDEPALFVALTFERREVLDSSNIKPMNLIGVDRGENIPAVIALTDPEGCPLSRFKDSLGNPTHILRIGESYKEKQRTIQAKKEVEQRRAGGYSRKYASKAKNLADDMVRNTARDLLYYAVTQDAMLIFENLSRGFGRQGKRTFMAERQYTRMEDWLTAKLAYEGLPSKTYLSKTLAQYTSKTCSNCGFTITSADYDRVLEKLKKTATGWMTTINGKELKVEGQITYYNRYKRQNVVKDLSVELDRLSEESVNNDISSWTKGRSGEALSLLKKRFSHRPVQEKFVCLNCGFETHADEQAALNIARSWLFLRSQEYKKYQTNKTTGNTDKRAFVETWQSFYRKKLKEVWKPAV

SEQ ID NO: 2451 - protein, 978 aa, synthetic construct
QEIKRINKIRRRLVKDSNTKKAGKTGPPKTLLVRVMTPDLRERLENLRKKPENIPQPISNTSRANLNKLLTDYTEMKKAILHVYWEEFQKDPVGLMSRVAQPASKKIDQNKLKPEMDEKGNLTTAGFACSQCGQPLFVYKLEQVSEKGKAYTNYFGRCNVAEHEKLILLAQLKPEKDSDEAVTYSLGKFGQRALDFYSIHVTKESTHPVKPLAQIAGNRYASGPVGKALSDACMGTIASFLSKYQDIIIEHQKVVKGNQKRLESLRELAGKENLEYPSVTLPPQPHTKEGVDAYNEVIARVRMWVNLNLWQKLKLSRDDAKPLLRLKGFPSFPLVERQANEVDWWDMVCNVKKLINEKKEDGKVFWQNLAGYKRQEALRPYLSSEEDRKKGKKFARYQLGDLLLHLEKKHGEDWGKVYDEAWERIDKKVEGLSKHIKLEEERRSEDAQSKAALTDWLRAKASFVIEGLKEADKDEFCRCELKLQKWYGDLRGKPFAIEAENSILDISGFSKQYNCAFIWQKDGVKKLNLYLIINYFKGGKLRFKKIKPEAFEANRFYTVINKKSGEIVPMEVNFNFDDPNLIILPLAFGKRQGREFIWNDLLSLETGSLKLANGRVIEKTLYNRRTRQDEPALFVALTFERREVLDSSNIKPMNLIGVDRGENIPAVIALTDPEGCPLSRFKDSLGNPTHILRIGESYKEKQRTIQAKKEVEQRRAGGYSRKYASKAKNLADDMVRNTARDLLYYAVTQDAMLIFENLSRGFGRQGKRTFMAERQYTRMEDWLTAKLAYEGLPSKTYLSKTLAQYTSKTCSNCGFTITSADYDRVLEKLKKTATGWMTTINGKELKVEGQITYYNRYKRQNVVKDLSVELDRLSEESVNNDISSWTKGRSGEALSLLKKRFSHRPVQEKFVCLNCGFETHADEQAALNIARSWLFLRSQEYKKYQTNKTTGNTDKRAFVETWQSFYRKKLKEVWKPAV

SEQ ID NO: 2452 - protein, 977 aa, synthetic construct; identical to SEQ ID NO: 215

SEQ ID NO: 2453 - protein, 977 aa, synthetic construct
QEIKRINKIRRRLVKDSNTKKAGKTGPMKTLLVRVMTPDLRERLENLRKKPENIPQPISNTSRANLNKLLTDYTEMKKAILHVYWEEFQKDPVGLMSRVAQPASKKIDQNKLKPEMDEKGNLTTAGFACQCGQPLFVYKLEQVSEKGKAYTNYFGRCNVAEHEKLILLAQLKPEKDSDEAVTYSLGKFGQRALDFYSIHVTKESTHPVKPLAQIAGNRYASGPVGKALSDACMGTIASFLSKYQDIIIEHQKVVKGNQKRLESLRELAGKENLEYPSVTLPPQPHTKEGVDAYNEVIARVRMWVNLNLWQKLKLSRDDAKPLLRLKGFPSFPLVERQANEVDWWDMVCNVKKLINEKKEDGKVFWQNLAGYKRQEALRPYLSSEEDRKKGKKFARYQLGDLLLHLEKKHGEDWGKVYDEAWERIDKKVEGLSKHIKLEEERRSEDAQSKAALTDWLRAKASFVIEGLKEADKDEFCRCELKLQKWYGDLRGKPFAIEAENSILDISGFSKQYNCAFIWQKDGVKKLNLYLIINYFKGGKLRFKKIKPEAFEANRFYTVINKKSGEIVPMEVNFNFDDPNLIILPLAFGKRQGREFIWNDLLSLETGSLKLANGRVIEKTLYNRRTRQDEPALFVALTFERREVLDSSNIKPMNLIGVDRGENIPAVIALTDPEGCPLSRFKDSLGNPTHILRIGESYKEKQRTIQAKKEVEQRRAGGYSRKYASKAKNLADDMVRNTARDLLYYAVTQDAMLIFENLSRGFGRQGKRTFMAERQYTRMEDWLTAKLAYEGLPSKTYLSKTLAQYTSKTCSNCGFTITSADYDRVLEKLKKTATGWMTTINGKELKVEGQITYYNRYKRQNVVKDLSVELDRLSEESVNNDISSWTKGRSGEALSLLKKRFSHRPVQEKFVCLNCGFETHADEQAALNIARSWLFLRSQEYKKYQTNKTTGNTDKRAFVETWQSFYRKKLKEVWKPAV

SEQ ID NO: 2454 - protein, 978 aa, synthetic construct
QEIKRINKIRRRLVKDSNTKKAGKTGPMKTLLVRVMTPDLRERLENLRKKPENIPQPISNTSRANLNKLLTDYTEMKKAILHVYWEEFQKDPVGLMSRVAQPASKKIDQNKLKPEMDEKGNLTTAGFACSQCGQPLFVYKLEQVSEKGKAYTNYFGRCNVAEHEKLILLAQLKPEKDSDEAVTYSLGKFGQRALDFYSIHVTKESTHPVKPLAQIAGNRYASGPVGKALSDACMGTIASFLSKYHDIIIEHQKVVKGNQKRLESLRELAGKENLEYPSVTLPPQPHTKEGVDAYNEVIARVRMWVNLNLWQKLKLSRDDAKPLLRLKGFPSFPLVERQANEVDWWDMVCNVKKLINEKKEDGKVFWQNLAGYKRQEALRPYLSSEEDRKKGKKFARYQLGDLLLHLEKKHGEDWGKVYDEAWERIDKKVEGLSKHIKLEEERRSEDAQSKAALTDWLRAKASFVIEGLKEADKDEFCRCELKLQKWYGDLRGKPFAIEAENSILDISGFSKQYNCAFIWQKDGVKKLNLYLIINYFKGGKLRFKKIKPEAFEANRFYTVINKKSGEIVPMEVNFNFDDPNLIILPLAFGKRQGREFIWNDLLSLETGSLKLANGRVIEKTLYNRRTRQDEPALFVALTFERREVLDSSNIKPMNLIGVDRGENIPAVIALTDPEGCPLSRFKDSLGNPTHILRIGESYKEKQRTIQAKKEVEQRRAGGYSRKYASKAKNLADDMVRNTARDLLYYAVTQDAMLIFENLSRGFGRQGKRTFMAERQYTRMEDWLTAKLAYEGLPSKTYLSKTLAQYTSKTCSNCGFTITSADYDRVLEKLKKTATGWMTTINGKELKVEGQITYYNRYKRQNVVKDLSVELDRLSEESVNNDISSWTKGRSGEALSLLKKRFSHRPVQEKFVCLNCGFETHADEQAALNIARSWLFLRSQEYKKYQTNKTTGNTDKRAFVETWQSFYRKKLKEVWKPAV

SEQ ID NO: 2455 - protein, 978 aa, synthetic construct
QEIKRINKIRRRLVKDSNTKKAGKTGPMKTLLVRVMTPDLRERLENLRKKPENIPQPISNTSRANLNKLLTDYTEMKKAILHVYWEEFQKDPVGLMSRVAQPASKKIDQNKLKPEMDEKGNLTTAGFACSQCGQPLFVYKLEQVSEKGKAYTNYFGRCNVAEHEKLILLAQLKPEKDSDEAVTYSLGKFGQRALDFYSIHVTKESTHPVKPLAQIAGNRYASGPVGKALSDACMGTIAHFLSKYQDIIIEHQKVVKGNQKRLESLRELAGKENLEYPSVTLPPQPHTKEGVDAYNEVIARVRMWVNLNLWQKLKLSRDDAKPLLRLKGFPSFPLVERQANEVDWWDMVCNVKKLINEKKEDGKVFWQNLAGYKRQEALRPYLSSEEDRKKGKKFARYQLGDLLLHLEKKHGEDWGKVYDEAWERIDKKVEGLSKHIKLEEERRSEDAQSKAALTDWLRAKASFVIEGLKEADKDEFCRCELKLQKWYGDLRGKPFAIEAENSILDISGFSKQYNCAFIWQKDGVKKLNLYLIINYFKGGKLRFKKIKPEAFEANRFYTVINKKSGEIVPMEVNFNFDDPNLIILPLAFGKRQGREFIWNDLLSLETGSLKLANGRVIEKTLYNRRTRQDEPALFVALTFERREVLDSSNIKPMNLIGVDRGENIPAVIALTDPEGCPLSRFKDSLGNPTHILRIGESYKEKQRTIQAKKEVEQRRAGGYSRKYASKAKNLADDMVRNTARDLLYYAVTQDAMLIFENLSRGFGRQGKRTFMAERQYTRMEDWLTAKLAYEGLPSKTYLSKTLAQYTSKTCSNCGFTITSADYDRVLEKLKKTATGWMTTINGKELKVEGQITYYNRYKRQNVVKDLSVELDRLSEESVNNDISSWTKGRSGEALSLLKKRFSHRPVQEKFVCLNCGFETHADEQAALNIARSWLFLRSQEYKKYQTNKTTGNTDKRAFVETWQSFYRKKLKEVWKPAV

SEQ ID NO: 2456 - protein, 978 aa, synthetic construct
QEIKRINKIRRRLVKDSNTKKAGKTGPMKTLLVRVMTPDLRERLENLRKKPENIPQPISNTSRANLNKLLTDYTEMKKAILHVYWEEFQKDPVGLMSRVAQPASKKIDQNKLKPEMDEKGNLTTAGFACSQCGQPLFVYKLEQVSEKGKAYTNYFGRCNVAEHEKLILLAQLKPEKDSDEAVTYSLGKFGQRALDFYSIHVTKESTHPVKPLAQIAGNRYASGPVGKALSDACMGTIATFLSKYQDIIIEHQKVVKGNQKRLESLRELAGKENLEYPSVTLPPQPHTKEGVDAYNEVIARVRMWVNLNLWQKLKLSRDDAKPLLRLKGFPSFPLVERQANEVDWWDMVCNVKKLINEKKEDGKVFWQNLAGYKRQEALRPYLSSEEDRKKGKKFARYQLGDLLLHLEKKHGEDWGKVYDEAWERIDKKVEGLSKHIKLEEERRSEDAQSKAALTDWLRAKASFVIEGLKEADKDEFCRCELKLQKWYGDLRGKPFAIEAENSILDISGFSKQYNCAFIWQKDGVKKLNLYLIINYFKGGKLRFKKIKPEAFEANRFYTVINKKSGEIVPMEVNFNFDDPNLIILPLAFGKRQGREFIWNDLLSLETGSLKLANGRVIEKTLYNRRTRQDEPALFVALTFERREVLDSSNIKPMNLIGVDRGENIPAVIALTDPEGCPLSRFKDSLGNPTHILRIGESYKEKQRTIQAKKEVEQRRAGGYSRKYASKAKNLADDMVRNTARDLLYYAVTQDAMLIFENLSRGFGRQGKRTFMAERQYTRMEDWLTAKLAYEGLPSKTYLSKTLAQYTSKTCSNCGFTITSADYDRVLEKLKKTATGWMTTINGKELKVEGQITYYNRYKRQNVVKDLSVELDRLSEESVNNDISSWTKGRSGEALSLLKKRFSHRPVQEKFVCLNCGFETHADEQAALNIARSWLFLRSQEYKKYQTNKTTGNTDKRAFVETWQSFYRKKLKEVWKPAV

SEQ ID NO: 2457 - protein, 978 aa, synthetic construct
QEIKRINKIRRRLVKDSNTKKAGKTGPMKTLLVRVMTPDLRERLENLRKKPENIPQPISNTSRANLNKLLTDYTEMKKAILHVYWEEFQKDPVGLMSRVAQPASKKIDQNKLKPEMDEKGNLTTAGFACSQCGQPLFVYKLEQVSEKGKAYTNYFGRCNVAEHEKLILLAQLKPEKDSDEAVTYSLGKFGQRALDFYSIHVTKESTHPVKPLAQIAGNRYASGPVGKALSDACMGTIASFLSKYQDIIIEHQKVVKGNQKRLESLRELAGKENLEYPSVTLPPQPHTDEGVDAYNEVIARVRMWVNLNLWQKLKLSRDDAKPLLRLKGFPSFPLVERQANEVDWWDMVCNVKKLINEKKEDGKVFWQNLAGYKRQEALRPYLSSEEDRKKGKKFARYQLGDLLLHLEKKHGEDWGKVYDEAWERIDKKVEGLSKHIKLEEERRSEDAQSKAALTDWLRAKASFVIEGLKEADKDEFCRCELKLQKWYGDLRGKPFAIEAENSILDISGFSKQYNCAFIWQKDGVKKLNLYLIINYFKGGKLRFKKIKPEAFEANRFYTVINKKSGEIVPMEVNFNFDDPNLIILPLAFGKRQGREFIWNDLLSLETGSLKLANGRVIEKTLYNRRTRQDEPALFVALTFERREVLDSSNIKPMNLIGVDRGENIPAVIALTDPEGCPLSRFKDSLGNPTHILRIGESYKEKQRTIQAKKEVEQRRAGGYSRKYASKAKNLADDMVRNTARDLLYYAVTQDAMLIFENLSRGFGRQGKRTFMAERQYTRMEDWLTAKLAYEGLPSKTYLSKTLAQYTSKTCSNCGFTITSADYDRVLEKLKKTATGWMTTINGKELKVEGQITYYNRYKRQNVVKDLSVELDRLSEESVNNDISSWTKGRSGEALSLLKKRFSHRPVQEKFVCLNCGFETHADEQAALNIARSWLFLRSQEYKKYQTNKTTGNTDKRAFVETWQSFYRKKLKEVWKPAV

SEQ ID NO: 2458 - protein, 978 aa, synthetic construct
QEIKRINKIRRRLVKDSNTKKAGKTGPMKTLLVRVMTPDLRERLENLRKKPENIPQPISNTSRANLNKLLTDYTEMKKAILHVYWEEFQKDPVGLMSRVAQPASKKIDQNKLKPEMDEKGNLTTAGFACSQCGQPLFVYKLEQVSEKGKAYTNYFGRCNVAEHEKLILLAQLKPEKDSDEAVTYSLGKFGQRALDFYSIHVTKESTHPVKPLAQIAGNRYASGPVGKALSDACMGTIASFLSKYQDIIIEHQKVVKGNQKRLESLRELAGKENLEYPSVTLPPQPHTEEGVDAYNEVIARVRMWVNLNLWQKLKLSRDDAKPLLRLKGFPSFPLVERQANEVDWWDMVCNVKKLINEKKEDGKVFWQNLAGYKRQEALRPYLSSEEDRKKGKKFARYQLGDLLLHLEKKHGEDWGKVYDEAWERIDKKVEGLSKHIKLEEERRSEDAQSKAALTDWLRAKASFVIEGLKEADKDEFCRCELKLQKWYGDLRGKPFAIEAENSILDISGFSKQYNCAFIWQKDGVKKLNLYLIINYFKGGKLRFKKIKPEAFEANRFYTVINKKSGEIVPMEVNFNFDDPNLIILPLAFGKRQGREFIWNDLLSLETGSLKLANGRVIEKTLYNRRTRQDEPALFVALTFERREVLDSSNIKPMNLIGVDRGENIPAVIALTDPEGCPLSRFKDSLGNPTHILRIGESYKEKQRTIQAKKEVEQRRAGGYSRKYASKAKNLADDMVRNTARDLLYYAVTQDAMLIFENLSRGFGRQGKRTFMAERQYTRMEDWLTAKLAYEGLPSKTYLSKTLAQYTSKTCSNCGFTITSADYDRVLEKLKKTATGWMTTINGKELKVEGQITYYNRYKRQNVVKDLSVELDRLSEESVNNDISSWTKGRSGEALSLLKKRFSHRPVQEKFVCLNCGFETHADEQAALNIARSWLFLRSQEYKKYQTNKTTGNTDKRAFVETWQSFYRKKLKEVWKPAV

SEQ ID NO: 2459 - protein, 978 aa, synthetic construct
QEIKRINKIRRRLVKDSNTKKAGKTGPMKTLLVRVMTPDLRERLENLRKKPENIPQPISNTSRANLNKLLTDYTEMKKAILHVYWEEFQKDPVGLMSRVAQPASKKIDQNKLKPEMDEKGNLTTAGFACSQCGQPLFVYKLEQVSEKGKAYTNYFGRCNVAEHEKLILLAQLKPEKDSDEAVTYSLGKFGQRALDFYSIHVTKESTHPVKPLAQIAGNRYASGPVGKALSDACMGTIASFLSKYQDIIIEHQKVVKGNQKRLESLRELAGKENLEYPSVTLPPQPHTKEGVDAYNEVIARVRMWVNLNLWQKLKLSRDDAKPLLRLKRFPSFPLVERQANEVDWWDMVCNVKKLINEKKEDGKVFWQNLAGYKRQEALRPYLSSEEDRKKGKKFARYQLGDLLLHLEKKHGEDWGKVYDEAWERIDKKVEGLSKHIKLEEERRSEDAQSKAALTDWLRAKASFVIEGLKEADKDEFCRCELKLQKWYGDLRGKPFAIEAENSILDISGFSKQYNCAFIWQKDGVKKLNLYLIINYFKGGKLRFKKIKPEAFEANRFYTVINKKSGEIVPMEVNFNFDDPNLIILPLAFGKRQGREFIWNDLLSLETGSLKLANGRVIEKTLYNRRTRQDEPALFVALTFERREVLDSSNIKPMNLIGVDRGENIPAVIALTDPEGCPLSRFKDSLGNPTHILRIGESYKEKQRTIQAKKEVEQRRAGGYSRKYASKAKNLADDMVRNTARDLLYYAVTQDAMLIFENLSRGFGRQGKRTFMAERQYTRMEDWLTAKLAYEGLPSKTYLSKTLAQYTSKTCSNCGFTITSADYDRVLEKLKKTATGWMTTINGKELKVEGQITYYNRYKRQNVVKDLSVELDRLSEESVNNDISSWTKGRSGEALSLLKKRFSHRPVQEKFVCLNCGFETHADEQAALNIARSWLFLRSQEYKKYQTNKTTGNTDKRAFVETWQSFYRKKLKEVWKPAV

SEQ ID NO: 2460 - protein, 978 aa, synthetic construct
QEIKRINKIRRRLVKDSNTKKAGKTGPMKTLLVRVMTPDLRERLENLRKKPENIPQPISNTSRANLNKLLTDYTEMKKAILHVYWEEFQKDPVGLMSRVAQPASKKIDQNKLKPEMDEKGNLTTAGFACSQCGQPLFVYKLEQVSEKGKAYTNYFGRCNVAEHEKLILLAQLKPEKDSDEAVTYSLGKFGQRALDFYSIHVTKESTHPVKPLAQIAGNRYASGPVGKALSDACMGTIASFLSKYQDIIIEHQKVVKGNQKRLESLRELAGKENLEYPSVTLPPQPHTKEGVDAYNEVIARVRMWVNLNLWQKLKLSRDDAKPLLRLKKFPSFPLVERQANEVDWWDMVCNVKKLINEKKEDGKVFWQNLAGYKRQEALRPYLSSEEDRKKGKKFARYQLGDLLLHLEKKHGEDWGKVYDEAWERIDKKVEGLSKHIKLEEERRSEDAQSKAALTDWLRAKASFVIEGLKEADKDEFCRCELKLQKWYGDLRGKPFAIEAENSILDISGFSKQYNCAFIWQKDGVKKLNLYLIINYFKGGKLRFKKIKPEAFEANRFYTVINKKSGEIVPMEVNFNFDDPNLIILPLAFGKRQGREFIWNDLLSLETGSLKLANGRVIEKTLYNRRTRQDEPALFVALTFERREVLDSSNIKPMNLIGVDRGENIPAVIALTDPEGCPLSRFKDSLGNPTHILRIGESYKEKQRTIQAKKEVEQRRAGGYSRKYASKAKNLADDMVRNTARDLLYYAVTQDAMLIFENLSRGFGRQGKRTFMAERQYTRMEDWLTAKLAYEGLPSKTYLSKTLAQYTSKTCSNCGFTITSADYDRVLEKLKKTATGWMTTINGKELKVEGQITYYNRYKRQNVVKDLSVELDRLSEESVNNDISSWTKGRSGEALSLLKKRFSHRPVQEKFVCLNCGFETHADEQAALNIARSWLFLRSQEYKKYQTNKTTGNTDKRAFVETWQSFYRKKLKEVWKPAV

SEQ ID NO: 2461 - protein, 978 aa, synthetic construct
QEIKRINKIRRRLVKDSNTKKAGKTGPMKTLLVRVMTPDLRERLENLRKKPENIPQPISNTSRANLNKLLTDYTEMKKAILHVYWEEFQKDPVGLMSRVAQPASKKIDQNKLKPEMDEKGNLTTAGFACSQCGQPLFVYKLEQVSEKGKAYTNYFGRCNVAEHEKLILLAQLKPEKDSDEAVTYSLGKFGQRALDFYSIHVTKESTHPVKPLAQIAGNRYASGPVGKALSDACMGTIASFLSKYQDIIIEHQKVVKGNQKRLESLRELAGKENLEYPSVTLPPQPHTKEGVDAYNEVIARVRMWVNKNLWQKLKLSRDDAKPLLRLKGFPSFPLVERQANEVDWWDMVCNVKKLINEKKEDGKVFWQNLAGYKRQEALRPYLSSEEDRKKGKKFARYQLGDLLLHLEKKHGEDWGKVYDEAWERIDKKVEGLSKHIKLEEERRSEDAQSKAALTDWLRAKASFVIEGLKEADKDEFCRCELKLQKWYGDLRGKPFAIEAENSILDISGFSKQYNCAFIWQKDGVKKLNLYLIINYFKGGKLRFKKIKPEAFEANRFYTVINKKSGEIVPMEVNFNFDDPNLIILPLAFGKRQGREFIWNDLLSLETGSLKLANGRVIEKTLYNRRTRQDEPALFVALTFERREVLDSSNIKPMNLIGVDRGENIPAVIALTDPEGCPLSRFKDSLGNPTHILRIGESYKEKQRTIQAKKEVEQRRAGGYSRKYASKAKNLADDMVRNTARDLLYYAVTQDAMLIFENLSRGFGRQGKRTFMAERQYTRMEDWLTAKLAYEGLPSKTYLSKTLAQYTSKTCSNCGFTITSADYDRVLEKLKKTATGWMTTINGKELKVEGQITYYNRYKRQNVVKDLSVELDRLSEESVNNDISSWTKGRSGEALSLLKKRFSHRPVQEKFVCLNCGFETHADEQAALNIARSWLFLRSQEYKKYQTNKTTGNTDKRAFVETWQSFYRKKLKEVWKPAV

SEQ ID NO: 2462 - protein, 978 aa, synthetic construct
QEIKRINKIRRRLVKDSNTKKAGKTGPMKTLLVRVMTPDLRERLENLRKKPENIPQPISNTSRANLNKLLTDYTEMKKAILHVYWEEFQKDPVGLMSRVAQPASKKIDQNKLKPEMDEKGNLTTAGFACSQCGQPLFVYKLEQVSEKGKAYTNYFGRCNVAEHEKLILLAQLKPEKDSDEAVTYSLGKFGQRALDFYSIHVTKESTHPVKPLAQIAGNRYASGPVGKALSDACMGTIASFLSKYQDIIIEHQKVVKGNQKRLESLRELAGKENLEYPSVTLPPQPHTKEGVDAYNEVIARVRRWVNLNLWQKLKLSRDDAKPLLRLKGFPSFPLVERQANEVDWWDMVCNVKKLINEKKEDGKVFWQNLAGYKRQEALRPYLSSEEDRKKGKKFARYQLGDLLLHLEKKHGEDWGKVYDEAWERIDKKVEGLSKHIKLEEERRSEDAQSKAALTDWLRAKASFVIEGLKEADKDEFCRCELKLQKWYGDLRGKPFAIEAENSILDISGFSKQYNCAFIWQKDGVKKLNLYLIINYFKGGKLRFKKIKPEAFEANRFYTVINKKSGEIVPMEVNFNFDDPNLIILPLAFGKRQGREFIWNDLLSLETGSLKLANGRVIEKTLYNRRTRQDEPALFVALTFERREVLDSSNIKPMNLIGVDRGENIPAVIALTDPEGCPLSRFKDSLGNPTHILRIGESYKEKQRTIQAKKEVEQRRAGGYSRKYASKAKNLADDMVRNTARDLLYYAVTQDAMLIFENLSRGFGRQGKRTFMAERQYTRMEDWLTAKLAYEGLPSKTYLSKTLAQYTSKTCSNCGFTITSADYDRVLEKLKKTATGWMTTINGKELKVEGQITYYNRYKRQNVVKDLSVELDRLSEESVNNDISSWTKGRSGEALSLLKKRFSHRPVQEKFVCLNCGFETHADEQAALNIARSWLFLRSQEYKKYQTNKTTGNTDKRAFVETWQSFYRKKLKEVWKPAV

SEQ ID NO: 2463 - protein, 978 aa, synthetic construct
QEIKRINKIRRRLVKDSNTKKAGKTGPMKTLLVRVMTPDLRERLENLRKKPENIPQPISNTSRANLNKLLTDYTEMKKAILHVYWEEFQKDPVGLMSRVAQPASKKIDQNKLKPEMDEKGNLTTAGFACSQCGQPLFVYKLEQVSEKGKAYTNYFGRCNVAEHEKLILLAQLKPEKDSDEAVTYSLGKFGQRALDFYSIHVTKESTHPVKPLAQIAGNRYASGPVGKALSDACMGTIASFLSKYQDIIIEHQKVVKGNQKRLESLRELAGKENLEYPSVTLPPQPHTKEGVDAYNEVIARVRKWVNLNLWQKLKLSRDDAKPLLRLKGFPSFPLVERQANEVDWWDMVCNVKKLINEKKEDGKVFWQNLAGYKRQEALRPYLSSEEDRKKGKKFARYQLGDLLLHLEKKHGEDWGKVYDEAWERIDKKVEGLSKHIKLEEERRSEDAQSKAALTDWLRAKASFVIEGLKEADKDEFCRCELKLQKWYGDLRGKPFAIEAENSILDISGFSKQYNCAFIWQKDGVKKLNLYLIINYFKGGKLRFKKIKPEAFEANRFYTVINKKSGEIVPMEVNFNFDDPNLIILPLAFGKRQGREFIWNDLLSLETGSLKLANGRVIEKTLYNRRTRQDEPALFVALTFERREVLDSSNIKPMNLIGVDRGENIPAVIALTDPEGCPLSRFKDSLGNPTHILRIGESYKEKQRTIQAKKEVEQRRAGGYSRKYASKAKNLADDMVRNTARDLLYYAVTQDAMLIFENLSRGFGRQGKRTFMAERQYTRMEDWLTAKLAYEGLPSKTYLSKTLAQYTSKTCSNCGFTITSADYDRVLEKLKKTATGWMTTINGKELKVEGQITYYNRYKRQNVVKDLSVELDRLSEESVNNDISSWTKGRSGEALSLLKKRFSHRPVQEKFVCLNCGFETHADEQAALNIARSWLFLRSQEYKKYQTNKTTGNTDKRAFVETWQSFYRKKLKEVWKPAV

SEQ ID NO: 2464 - protein, 978 aa, synthetic construct
QEIKRINKIRRRLVKDSNTKKAGKTGPMKTLLVRVMTPDLRERLENLRKKPENIPQPISNTSRANLNKLLTDYTEMKKAILHVYWEEFQKDPVGLMSRVAQPASKKIDQNKLKPEMDEKGNLTTAGFACSQCGQPLFVYKLEQVSEKGKAYTNYFGRCNVAEHEKLILLAQLKPEKDSDEAVTYSLGKFGQRALDFYSIHVTKESTHPVKPLAQIAGNRYASGPVGKALSDACMGTIASFLSKYQDIIIEHQKVVKGNQKRLESLRELAGKENLEYPSVTLPPQPHTKEGVDAYNEVIARVRMWVNLNLWQKLKLSRDDAKPLLRLKGFPSFPLVERQANEVDWWDMVCNVKKLINEKKEDGKVFWQNLAGYKRQEALRPYLSSEEDRKKGKKFARYQLGDLLLHLEKKHGEDWGKVYDEAWERIDKKVEGLSKHIKLEEERRSEDAQSKAALTDWLRAKASFVIEGLKEADKDEFRRCELKLQKWYGDLRGKPFAIEAENSILDISGFSKQYNCAFIWQKDGVKKLNLYLIINYFKGGKLRFKKIKPEAFEANRFYTVINKKSGEIVPMEVNFNFDDPNLIILPLAFGKRQGREFIWNDLLSLETGSLKLANGRVIEKTLYNRRTRQDEPALFVALTFERREVLDSSNIKPMNLIGVDRGENIPAVIALTDPEGCPLSRFKDSLGNPTHILRIGESYKEKQRTIQAKKEVEQRRAGGYSRKYASKAKNLADDMVRNTARDLLYYAVTQDAMLIFENLSRGFGRQGKRTFMAERQYTRMEDWLTAKLAYEGLPSKTYLSKTLAQYTSKTCSNCGFTITSADYDRVLEKLKKTATGWMTTINGKELKVEGQITYYNRYKRQNVVKDLSVELDRLSEESVNNDISSWTKGRSGEALSLLKKRFSHRPVQEKFVCLNCGFETHADEQAALNIARSWLFLRSQEYKKYQTNKTTGNTDKRAFVETWQSFYRKKLKEVWKPAV

SEQ ID NO: 2465 - protein, 978 aa, synthetic construct
QEIKRINKIRRRLVKDSNTKKAGKTGPMKTLLVRVMTPDLRERLENLRKKPENIPQPISNTSRANLNKLLTDYTEMKKAILHVYWEEFQKDPVGLMSRVAQPASKKIDQNKLKPEMDEKGNLTTAGFACSQCGQPLFVYKLEQVSEKGKAYTNYFGRCNVAEHEKLILLAQLKPEKDSDEAVTYSLGKFGQRALDFYSIHVTKESTHPVKPLAQIAGNRYASGPVGKALSDACMGTIASFLSKYQDIIIEHQKVVKGNQKRLESLRELAGKENLEYPSVTLPPQPHTKEGVDAYNEVIARVRMWVNLNLWQKLKLSRDDAKPLLRLKGFPSFPLVERQANEVDWWDMVCNVKKLINEKKEDGKVFWQNLAGYKRQEALRPYLSSEEDRKKGKKFARYQLGDLLLHLEKKHGEDWGKVYDEAWERIDKKVEGLSKHIKLEEERRSEDAQSKAALTDWLRAKASFVIEGLKEADKDEFKRCELKLQKWYGDLRGKPFAIEAENSILDISGFSKQYNCAFIWQKDGVKKLNLYLIINYFKGGKLRFKKIKPEAFEANRFYTVINKKSGEIVPMEVNFNFDDPNLIILPLAFGKRQGREFIWNDLLSLETGSLKLANGRVIEKTLYNRRTRQDEPALFVALTFERREVLDSSNIKPMNLIGVDRGENIPAVIALTDPEGCPLSRFKDSLGNPTHILRIGESYKEKQRTIQAKKEVEQRRAGGYSRKYASKAKNLADDMVRNTARDLLYYAVTQDAMLIFENLSRGFGRQGKRTFMAERQYTRMEDWLTAKLAYEGLPSKTYLSKTLAQYTSKTCSNCGFTITSADYDRVLEKLKKTATGWMTTINGKELKVEGQITYYNRYKRQNVVKDLSVELDRLSEESVNNDISSWTKGRSGEALSLLKKRFSHRPVQEKFVCLNCGFETHADEQAALNIARSWLFLRSQEYKKYQTNKTTGNTDKRAFVETWQSFYRKKLKEVWKPAV

SEQ ID NO: 2466 - protein, 978 aa, synthetic construct
QEIKRINKIRRRLVKDSNTKKAGKTGPMKTLLVRVMTPDLRERLENLRKKPENIPQPISNTSRANLNKLLTDYTEMKKAILHVYWEEFQKDPVGLMSRVAQPASKKIDQNKLKPEMDEKGNLTTAGFACSQCGQPLFVYKLEQVSEKGKAYTNYFGRCNVAEHEKLILLAQLKPEKDSDEAVTYSLGKFGQRALDFYSIHVTKESTHPVKPLAQIAGNRYASGPVGKALSDACMGTIASFLSKYQDIIIEHQKVVKGNQKRLESLRELAGKENLEYPSVTLPPQPHTKEGVDAYNEVIARVRMWVNLNLWQKLKLSRDDAKPLLRLKGFPSFPLVERQANEVDWWDMVCNVKKLINEKKEDGKVFWQNLAGYKRQEALRPYLSSEEDRKKGKKFARYQLGDLLLHLEKKHGEDWGKVYDEAWERIDKKVEGLSKHIKLEEERRSEDAQSKAALTDWLRAKASFVIEGLKEADKDEFCRCELKLQKWYGDLRGKPFAIEAENSILDISGFSKQYNCAFIWQKDGVKKLNLYLIINYFKGGKLRFKKIKPEAFEANRFYTVINKKSGEIVPMEVNFNFDDPNLIILPLAFGKRQGREFIWNDLLSLETGSLKLANGRVIEKTLYNRRTRQDEPALFVALTFERREVLDSSNIKPMNLIGVDRGENIPAVIALTDPEGCPLSRFKDSLGNPTHILRIGERYKEKQRTIQAKKEVEQRRAGGYSRKYASKAKNLADDMVRNTARDLLYYAVTQDAMLIFENLSRGFGRQGKRTFMAERQYTRMEDWLTAKLAYEGLPSKTYLSKTLAQYTSKTCSNCGFTITSADYDRVLEKLKKTATGWMTTINGKELKVEGQITYYNRYKRQNVVKDLSVELDRLSEESVNNDISSWTKGRSGEALSLLKKRFSHRPVQEKFVCLNCGFETHADEQAALNIARSWLFLRSQEYKKYQTNKTTGNTDKRAFVETWQSFYRKKLKEVWKPAV

SEQ ID NO: 2467 - protein, 978 aa, synthetic construct
QEIKRINKIRRRLVKDSNTKKAGKTGPMKTLLVRVMTPDLRERLENLRKKPENIPQPISNTSRANLNKLLTDYTEMKKAILHVYWEEFQKDPVGLMSRVAQPASKKIDQNKLKPEMDEKGNLTTAGFACSQCGQPLFVYKLEQVSEKGKAYTNYFGRCNVAEHEKLILLAQLKPEKDSDEAVTYSLGKFGQRALDFYSIHVTKESTHPVKPLAQIAGNRYASGPVGKALSDACMGTIASFLSKYQDIIIEHQKVVKGNQKRLESLRELAGKENLEYPSVTLPPQPHTKEGVDAYNEVIARVRMWVNLNLWQKLKLSRDDAKPLLRLKGFPSFPLVERQANEVDWWDMVCNVKKLINEKKEDGKVFWQNLAGYKRQEALRPYLSSEEDRKKGKKFARYQLGDLLLHLEKKHGEDWGKVYDEAWERIDKKVEGLSKHIKLEEERRSEDAQSKAALTDWLRAKASFVIEGLKEADKDEFCRCELKLQKWYGDLRGKPFAIEAENSILDISGFSKQYNCAFIWQKDGVKKLNLYLIINYFKGGKLRFKKIKPEAFEANRFYTVINKKSGEIVPMEVNFNFDDPNLIILPLAFGKRQGREFIWNDLLSLETGSLKLANGRVIEKTLYNRRTRQDEPALFVALTFERREVLDSSNIKPMNLIGVDRGENIPAVIALTDPEGCPLSRFKDSLGNPTHILRIGEKYKEKQRTIQAKKEVEQRRAGGYSRKYASKAKNLADDMVRNTARDLLYYAVTQDAMLIFENLSRGFGRQGKRTFMAERQYTRMEDWLTAKLAYEGLPSKTYLSKTLAQYTSKTCSNCGFTITSADYDRVLEKLKKTATGWMTTINGKELKVEGQITYYNRYKRQNVVKDLSVELDRLSEESVNNDISSWTKGRSGEALSLLKKRFSHRPVQEKFVCLNCGFETHADEQAALNIARSWLFLRSQEYKKYQTNKTTGNTDKRAFVETWQSFYRKKLKEVWKPAV

SEQ ID NO: 2468 - protein, 977 aa, synthetic construct
QEIKRINKIRRRLVKDSNTKKAGKTGPMKTLLVRVMTPDLRERLENLRKKPENIPQPISNTSRANLNKLLTDYTEMKKAILHVYWEEFQKDPVGLMSRVAQPASKKIDQNKLKPEMDEKGNLTTAGFACSQCGQPLFVYKLEQVSEKGKAYTNYFGRCNVAEHEKLILLAQLKPEKDSDEAVTYSLGKFGQRALDFYSIHVTKESTHPVKPLAQIAGNRYASGPVGKALSDACMGTIASFLSKYQDIIIEHQKVVKGNQKRLESLRELAGKENLEYPSVTLPPQPHTKEGVDAYNEVIARVRMWVNLNLWQKLKLSRDDAKPLLRLKGFPSFPLVERQANEVDWWDMVCNVKKLINEKKEDGKVFWQNLAGYKRQEALRPYLSSEEDRKKGKKFARYQLGDLLLHLEKKHGEDWGKVYDEAWERIDKKVEGLSKHIKLEEERRSEDAQSKAALTDWLRAKASFVIEGLKEADKDEFCRCELKLQKWYGDLRGKPFAIEAENILDISGFSKQYNCAFIWQKDGVKKLNLYLIINYFKGGKLRFKKIKPEAFEANRFYTVINKKSGEIVPMEVNFNFDDPNLIILPLAFGKRQGREFIWNDLLSLETGSLKLANGRVIEKTLYNRRTRQDEPALFVALTFERREVLDSSNIKPMNLIGVDRGENIPAVIALTDPEGCPLSRFKDSLGNPTHILRIGESYKEKQRTIQAKKEVEQRRAGGYSRKYASKAKNLADDMVRNTARDLLYYAVTQDAMLIFENLSRGFGRQGKRTFMAERQYTRMEDWLTAKLAYEGLPSKTYLSKTLAQYTSKTCSNCGFTITSADYDRVLEKLKKTATGWMTTINGKELKVEGQITYYNRYKRQNVVKDLSVELDRLSEESVNNDISSWTKGRSGEALSLLKKRFSHRPVQEKFVCLNCGFETHADEQAALNIARSWLFLRSQEYKKYQTNKTTGNTDKRAFVETWQSFYRKKLKEVWKPAV

SEQ ID NO: 2469 - protein, 977 aa, synthetic construct
QEIKRINKIRRRLVKDSNTKKAGKTGPMKTLLVRVMTPDLRERLENLRKKPENIPQPISNTSRANLNKLLTDYTEMKKAILHVYWEEFQKDPVGLMSRVAQPASKKIDQNKLKPEMDEKGNLTTAGFACSQCGQPLFVYKLEQVSEKGKAYTNYFGRCNVAEHEKLILLAQLKPEKDSDEAVTYSLGKFGQRALDFYSIHVTKESTHPVKPLAQIAGNRYASGPVGKALSDACMGTIASFLSKYQDIIIEHQKVVKGNQKRLESLRELAGKENLEYPSVTLPPQPHTKEGVDAYNEVIARVRMWVNLNLWQKLKLSRDDAKPLLRLKGFPSFPLVERQANEVDWWDMVCNVKKLINEKKEDGKVFWQNLAGYKRQEALRPYLSSEEDRKKGKKFARYQLGDLLLHLEKKHGEDWGKVYDEAWERIDKKVEGLSKHIKLEEERRSEDAQSKAALTDWLRAKASFVIEGLKEADKDEFCRCELKLQKWYGDLRGKPFAIEAENSIDISGFSKQYNCAFIWQKDGVKKLNLYLIINYFKGGKLRFKKIKPEAFEANRFYTVINKKSGEIVPMEVNFNFDDPNLIILPLAFGKRQGREFIWNDLLSLETGSLKLANGRVIEKTLYNRRTRQDEPALFVALTFERREVLDSSNIKPMNLIGVDRGENIPAVIALTDPEGCPLSRFKDSLGNPTHILRIGESYKEKQRTIQAKKEVEQRRAGGYSRKYASKAKNLADDMVRNTARDLLYYAVTQDAMLIFENLSRGFGRQGKRTFMAERQYTRMEDWLTAKLAYEGLPSKTYLSKTLAQYTSKTCSNCGFTITSADYDRVLEKLKKTATGWMTTINGKELKVEGQITYYNRYKRQNVVKDLSVELDRLSEESVNNDISSWTKGRSGEALSLLKKRFSHRPVQEKFVCLNCGFETHADEQAALNIARSWLFLRSQEYKKYQTNKTTGNTDKRAFVETWQSFYRKKLKEVWKPAV

SEQ ID NO: 2470 - protein, 978 aa, synthetic construct
QEIKRINKIRRRLVKDSNTKKAGKTGPMKTLLVRVMTPDLRERLENLRKKPENIPQPISNTSRANLNKLLTDYTEMKKAILHVYWEEFQKDPVGLMSRVAQPASKKIDQNKLKPEMDEKGNLTTAGFACSQCGQPLFVYKLEQVSEKGKAYTNYFGRCNVAEHEKLILLAQLKPEKDSDEAVTYSLGKFGQRALDFYSIHVTKESTHPVKPLAQIAGNRYASGPVGKALSDACMGTIASFLSKYQDIIIEHQKVVKGNQKRLESLRELAGKENLEYPSVTLPPQPHTKEGVDAYNEVIARVRMWVNLNLWQKLKLSRDDAKPLLRLKGFPSFPLVERQANEVDWWDMVCNVKKLINEKKEDGKVFWQNLAGYKRQEALRPYLSSEEDRKKGKKFARYQLGDLLLHLEKKHGEDWGKVYDEAWERIDKKVEGLSKHIKLEEERRSEDAQSKAALTDWLRAKASFVIEGLKEADKDEFCRCELKLQKWYGDLRGKPFAIEAENSRLDISGFSKQYNCAFIWQKDGVKKLNLYLIINYFKGGKLRFKKIKPEAFEANRFYTVINKKSGEIVPMEVNFNFDDPNLIILPLAFGKRQGREFIWNDLLSLETGSLKLANGRVIEKTLYNRRTRQDEPALFVALTFERREVLDSSNIKPMNLIGVDRGENIPAVIALTDPEGCPLSRFKDSLGNPTHILRIGESYKEKQRTIQAKKEVEQRRAGGYSRKYASKAKNLADDMVRNTARDLLYYAVTQDAMLIFENLSRGFGRQGKRTFMAERQYTRMEDWLTAKLAYEGLPSKTYLSKTLAQYTSKTCSNCGFTITSADYDRVLEKLKKTATGWMTTINGKELKVEGQITYYNRYKRQNVVKDLSVELDRLSEESVNNDISSWTKGRSGEALSLLKKRFSHRPVQEKFVCLNCGFETHADEQAALNIARSWLFLRSQEYKKYQTNKTTGNTDKRAFVETWQSFYRKKLKEVWKPAV

SEQ ID NO: 2471 - protein, 978 aa, synthetic construct
QEIKRINKIRRRLVKDSNTKKAGKTGPMKTLLVRVMTPDLRERLENLRKKPENIPQPISNTSRANLNKLLTDYTEMKKAILHVYWEEFQKDPVGLMSRVAQPASKKIDQNKLKPEMDEKGNLTTAGFACSQCGQPLFVYKLEQVSEKGKAYTNYFGRCNVAEHEKLILLAQLKPEKDSDEAVTYSLGKFGQRALDFYSIHVTKESTHPVKPLAQIAGNRYASGPVGKALSDACMGTIASFLSKYQDIIIEHQKVVKGNQKRLESLRELAGKENLEYPSVTLPPQPHTKEGVDAYNEVIARVRMWVNLNLWQKLKLSRDDAKPLLRLKGFPSFPLVERQANEVDWWDMVCNVKKLINEKKEDGKVFWQNLAGYKRQEALRPYLSSEEDRKKGKKFARYQLGDLLLHLEKKHGEDWGKVYDEAWERIDKKVEGLSKHIKLEEERRSEDAQSKAALTDWLRAKASFVIEGLKEADKDEFCRCELKLQKWYGDLRGKPFAIEAENSKLDISGFSKQYNCAFIWQKDGVKKLNLYLIINYFKGGKLRFKKIKPEAFEANRFYTVINKKSGEIVPMEVNFNFDDPNLIILPLAFGKRQGREFIWNDLLSLETGSLKLANGRVIEKTLYNRRTRQDEPALFVALTFERREVLDSSNIKPMNLIGVDRGENIPAVIALTDPEGCPLSRFKDSLGNPTHILRIGESYKEKQRTIQAKKEVEQRRAGGYSRKYASKAKNLADDMVRNTARDLLYYAVTQDAMLIFENLSRGFGRQGKRTFMAERQYTRMEDWLTAKLAYEGLPSKTYLSKTLAQYTSKTCSNCGFTITSADYDRVLEKLKKTATGWMTTINGKELKVEGQITYYNRYKRQNVVKDLSVELDRLSEESVNNDISSWTKGRSGEALSLLKKRFSHRPVQEKFVCLNCGFETHADEQAALNIARSWLFLRSQEYKKYQTNKTTGNTDKRAFVETWQSFYRKKLKEVWKPAV

SEQ ID NO: 2472 - protein, 978 aa, synthetic construct
QEIKRINKIRRRLVKDSNTKKAGKTGPMKTLLVRVMTPDLRERLENLRKKPENIPQPISNTSRANLNKLLTDYTEMKKAILHVYWEEFQKDPVGLMSRVAQPASKKIDQNKLKPEMDEKGNLTTAGFACSQCGQPLFVYKLEQVSEKGKAYTNYFGRCNVAEHEKLILLAQLKPEKDSDEAVTYSLGKFGQRALDFYSIHVTKESTHPVKPLAQIAGNRYASGPVGKALSDACMGTIASFLSKYQDIIIEHQKVVKGNQKRLESLRELAGKENLEYPSVTLPPQPHTKEGVDAYNEVIARVRMWVNLNLWQKLKLSRDDAKPLLRLKGFPSFPLVERQANEVDWWDMVCNVKKLINEKKEDGKVFWQNLAGYKRQEALRPYLSSEEDRKKGKKFARYQLGDLLLHLEKKHGEDWGKVYDEAWERIDKKVEGLSKHIKLEEERRSEDAQSKAALTDWLRAKASFVIEGLKEADKDEFCRCELKLQKWYGDLRGKPFAIEAENSILDISGFSKQYNCAFIWQKDGVKKLNLYLIINYFKGGKLRFKKIKPEAFEANRFYTVINKKSGEIVPMEVNFNFDDPNLIILPLAFGKRQGREFIWNDLLSLETGSLQLANGRVIEKTLYNRRTRQDEPALFVALTFERREVLDSSNIKPMNLIGVDRGENIPAVIALTDPEGCPLSRFKDSLGNPTHILRIGESYKEKQRTIQAKKEVEQRRAGGYSRKYASKAKNLADDMVRNTARDLLYYAVTQDAMLIFENLSRGFGRQGKRTFMAERQYTRMEDWLTAKLAYEGLPSKTYLSKTLAQYTSKTCSNCGFTITSADYDRVLEKLKKTATGWMTTINGKELKVEGQITYYNRYKRQNVVKDLSVELDRLSEESVNNDISSWTKGRSGEALSLLKKRFSHRPVQEKFVCLNCGFETHADEQAALNIARSWLFLRSQEYKKYQTNKTTGNTDKRAFVETWQSFYRKKLKEVWKPAV

SEQ ID NO: 2473 - protein, 978 aa, synthetic construct
QEIKRINKIRRRLVKDSNTKKAGKTGPMKTLLVRVMTPDLRERLENLRKKPENIPQPISNTSRANLNKLLTDYTEMKKAILHVYWEEFQKDPVGLMSRVAQPASKKIDQNKLKPEMDEKGNLTTAGFACSQCGQPLFVYKLEQVSEKGKAYTNYFGRCNVAEHEKLILLAQLKPEKDSDEAVTYSLGKFGQRALDFYSIHVTKESTHPVKPLAQIAGNRYASGPVGKALSDACMGTIASFLSKYQDIIIEHQKVVKGNQKRLESLRELAGKENLEYPSVTLPPQPHTKEGVDAYNEVIARVRMWVNLNLWQKLKLSRDDAKPLLRLKGFPSFPLVERQANEVDWWDMVCNVKKLINEKKEDGKVFWQNLAGYKRQEALRPYLSSEEDRKKGKKFARYQLGDLLLHLEKKHGEDWGKVYDEAWERIDKKVEGLSKHIKLEEERRSEDAQSKAALTDWLRAKASFVIEGLKEADKDEFCRCELKLQKWYGDLRGKPFAIEAENSILDISGFSKQYNCAFIWQKDGVKKLNLYLIINYFKGGKLRFKKIKPEAFEANRFYTVINKKSGEIVPMEVNFNFDDPNLIILPLAFGKRQGREFIWNDLLSLETGSLKLANGQVIEKTLYNRRTRQDEPALFVALTFERREVLDSSNIKPMNLIGVDRGENIPAVIALTDPEGCPLSRFKDSLGNPTHILRIGESYKEKQRTIQAKKEVEQRRAGGYSRKYASKAKNLADDMVRNTARDLLYYAVTQDAMLIFENLSRGFGRQGKRTFMAERQYTRMEDWLTAKLAYEGLPSKTYLSKTLAQYTSKTCSNCGFTITSADYDRVLEKLKKTATGWMTTINGKELKVEGQITYYNRYKRQNVVKDLSVELDRLSEESVNNDISSWTKGRSGEALSLLKKRFSHRPVQEKFVCLNCGFETHADEQAALNIARSWLFLRSQEYKKYQTNKTTGNTDKRAFVETWQSFYRKKLKEVWKPAV

SEQ ID NO: 2474 - protein, 978 aa, synthetic construct
QEIKRINKIRRRLVKDSNTKKAGKTGPMKTLLVRVMTPDLRERLENLRKKPENIPQPISNTSRANLNKLLTDYTEMKKAILHVYWEEFQKDPVGLMSRVAQPASKKIDQNKLKPEMDEKGNLTTAGFACSQCGQPLFVYKLEQVSEKGKATTNYFGRCNVAEHEKLILLAQLKPEKDSDEAVTYSLGKFGQRALDFYSIHVTKESTHPVKPLAQIAGNRYASGPVGKALSDACMGTIASFLSKYQDIIIEHQKVVKGNQKRLESLRELAGKENLEYPSVTLPPQPHTKEGVDAYNEVIARVRMWVNLNLWQKLKLSRDDAKPLLRLKGFPSFPLVERQANEVDWWDMVCNVKKLINEKKEDGKVFWQNLAGYKRQEALRPYLSSEEDRKKGKKFARYQLGDLLLHLEKKHGEDWGKVYDEAWERIDKKVEGLSKHIKLEEERRSEDAQSKAALTDWLRAKASFVIEGLKEADKDEFCRCELKLQKWYGDLRGKPFAIEAENSILDISGFSKQYNCAFIWQKDGVKKLNLYLIINYFKGGKLRFKKIKPEAFEANRFYTVINKKSGEIVPMEVNFNFDDPNLIILPLAFGKRQGREFIWNDLLSLETGSLKLANGRVIEKTLYNRRTRQDEPALFVALTFERREVLDSSNIKPMNLIGVDRGENIPAVIALTDPEGCPLSRFKDSLGNPTHILRIGESYKEKQRTIQAKKEVEQRRAGGYSRKYASKAKNLADDMVRNTARDLLYYAVTQDAMLIFENLSRGFGRQGKRTFMAERQYTRMEDWLTAKLAYEGLPSKTYLSKTLAQYTSKTCSNCGFTITSADYDRVLEKLKKTATGWMTTINGKELKVEGQITYYNRYKRQNVVKDLSVELDRLSEESVNNDISSWTKGRSGEALSLLKKRFSHRPVQEKFVCLNCGFETHADEQAALNIARSWLFLRSQEYKKYQTNKTTGNTDKRAFVETWQSFYRKKLKEVWKPAV

SEQ ID NO: 2475 - protein, 978 aa, synthetic construct
QEIKRINKIRRRLVKDSNTKKAGKTGPMKTLLVRVMTPDLRERLENLRKKPENIPQPISNTSRANLNKLLTDYTEMKKAILHVYWEEFQKDPVGLMSRVAQPASKKIDQNKLKPEMDEKGNLTTAGFACSQCGQPLFVYKLEQVSEKGKAYTNYFGRCNVAEHEKLILLAQLKPEKDSDEAVTYSLGQFGQRALDFYSIHVTKESTHPVKPLAQIAGNRYASGPVGKALSDACMGTIASFLSKYQDIIIEHQKVVKGNQKRLESLRELAGKENLEYPSVTLPPQPHTKEGVDAYNEVIARVRMWVNLNLWQKLKLSRDDAKPLLRLKGFPSFPLVERQANEVDWWDMVCNVKKLINEKKEDGKVFWQNLAGYKRQEALRPYLSSEEDRKKGKKFARYQLGDLLLHLEKKHGEDWGKVYDEAWERIDKKVEGLSKHIKLEEERRSEDAQSKAALTDWLRAKASFVIEGLKEADKDEFCRCELKLQKWYGDLRGKPFAIEAENSILDISGFSKQYNCAFIWQKDGVKKLNLYLIINYFKGGKLRFKKIKPEAFEANRFYTVINKKSGEIVPMEVNFNFDDPNLIILPLAFGKRQGREFIWNDLLSLETGSLKLANGRVIEKTLYNRRTRQDEPALFVALTFERREVLDSSNIKPMNLIGVDRGENIPAVIALTDPEGCPLSRFKDSLGNPTHILRIGESYKEKQRTIQAKKEVEQRRAGGYSRKYASKAKNLADDMVRNTARDLLYYAVTQDAMLIFENLSRGFGRQGKRTFMAERQYTRMEDWLTAKLAYEGLPSKTYLSKTLAQYTSKTCSNCGFTITSADYDRVLEKLKKTATGWMTTINGKELKVEGQITYYNRYKRQNVVKDLSVELDRLSEESVNNDISSWTKGRSGEALSLLKKRFSHRPVQEKFVCLNCGFETHADEQAALNIARSWLFLRSQEYKKYQTNKTTGNTDKRAFVETWQSFYRKKLKEVWKPAV

SEQ ID NO: 2476 - protein, 978 aa, synthetic construct
QEIKRINKIRRRLVKDSNTKKAGKTGPMKTLLVRVMTPDLRERLENLRKKPENIPQPISNTSRANLNKLLTDYTEMKKAILHVYWEEFQKDPVGLMSRVAQPASKKIDQNKLKPEMDEKGNLTTAGFACSQCGQPLFVYKLEQVSEKGKAYTNYFGRCNVAEHEKLILLAQLKPEKDSDEAVTYSLGKFQQRALDFYSIHVTKESTHPVKPLAQIAGNRYASGPVGKALSDACMGTIASFLSKYQDIIIEHQKVVKGNQKRLESLRELAGKENLEYPSVTLPPQPHTKEGVDAYNEVIARVRMWVNLNLWQKLKLSRDDAKPLLRLKGFPSFPLVERQANEVDWWDMVCNVKKLINEKKEDGKVFWQNLAGYKRQEALRPYLSSEEDRKKGKKFARYQLGDLLLHLEKKHGEDWGKVYDEAWERIDKKVEGLSKHIKLEEERRSEDAQSKAALTDWLRAKASFVIEGLKEADKDEFCRCELKLQKWYGDLRGKPFAIEAENSILDISGFSKQYNCAFIWQKDGVKKLNLYLIINYFKGGKLRFKKIKPEAFEANRFYTVINKKSGEIVPMEVNFNFDDPNLIILPLAFGKRQGREFIWNDLLSLETGSLKLANGRVIEKTLYNRRTRQDEPALFVALTFERREVLDSSNIKPMNLIGVDRGENIPAVIALTDPEGCPLSRFKDSLGNPTHILRIGESYKEKQRTIQAKKEVEQRRAGGYSRKYASKAKNLADDMVRNTARDLLYYAVTQDAMLIFENLSRGFGRQGKRTFMAERQYTRMEDWLTAKLAYEGLPSKTYLSKTLAQYTSKTCSNCGFTITSADYDRVLEKLKKTATGWMTTINGKELKVEGQITYYNRYKRQNVVKDLSVELDRLSEESVNNDISSWTKGRSGEALSLLKKRFSHRPVQEKFVCLNCGFETHADEQAALNIARSWLFLRSQEYKKYQTNKTTGNTDKRAFVETWQSFYRKKLKEVWKPAV

SEQ ID NO: 2477 - protein, 978 aa, synthetic construct; identical to SEQ ID NO: 209

SEQ ID NO: 2478 - protein, 978 aa, synthetic construct
QEIKPINKIRRRLVKDSNTKKAGKTGPMKTLLVRVMTPDLRERLENLRKKPENIPQPISNTSRANLNKLLTDYTEMKKAILHVYWEEFQKDPVGLMSRVAQPASKKIDQNKLKPEMDEKGNLTTAGFACSQCGQPLFVYKLEQVSEKGKAYTNYFGRCNVAEHEKLILLAQLKPEKDSDEAVTYSLGKFGQRALDFYSIHVTKESTHPVKPLAQIAGNRYASGPVGKALSDACMGTIASFLSKYQDIIIEHQKVVKGNQKRLESLRELAGKENLEYPSVTLPPQPHTKEGVDAYNEVIARVRMWVNLNLWQKLKLSRDDAKPLLRLKGFPSFPLVERQANEVDWWDMVCNVKKLINEKKEDGKVFWQNLAGYKRQEALRPYLSSEEDRKKGKKFARYQLGDLLLHLEKKHGEDWGKVYDEAWERIDKKVEGLSKHIKLEEERRSEDAQSKAALTDWLRAKASFVIEGLKEADKDEFCRCELKLQKWYGDLRGKPFAIEAENSILDISGFSKQYNCAFIWQKDGVKKLNLYLIINYFKGGKLRFKKIKPEAFEANRFYTVINKKSGEIVPMEVNFNFDDPNLIILPLAFGKRQGREFIWNDLLSLETGSLKLANGRVIEKTLYNRRTRQDEPALFVALTFERREVLDSSNIKPMNLIGVDRGENIPAVIALTDPEGCPLSRFKDSLGNPTHILRIGESYKEKQRTIQAKKEVEQRRAGGYSRKYASKAKNLADDMVRNTARDLLYYAVTQDAMLIFENLSRGFGRQGKRTFMAERQYTRMEDWLTAKLAYEGLPSKTYLSKTLAQYTSKTCSNCGFTITSADYDRVLEKLKKTATGWMTTINGKELKVEGQITYYNRYKRQNVVKDLSVELDRLSEESVNNDISSWTKGRSGEALSLLKKRFSHRPVQEKFVCLNCGFETHADEQAALNIARSWLFLRSQEYKKYQTNKTTGNTDKRAFVETWQSFYRKKLKEVWKPAV

SEQ ID NO: 2479 - protein, 978 aa, synthetic construct
QEIWRINKIRRRLVKDSNTKKAGKTGPMKTLLVRVMTPDLRERLENLRKKPENIPQPISNTSRANLNKLLTDYTEMKKAILHVYWEEFQKDPVGLMSRVAQPASKKIDQNKLKPEMDEKGNLTTAGFACSQCGQPLFVYKLEQVSEKGKAYTNYFGRCNVAEHEKLILLAQLKPEKDSDEAVTYSLGKFGQRALDFYSIHVTKESTHPVKPLAQIAGNRYASGPVGKALSDACMGTIASFLSKYQDIIIEHQKVVKGNQKRLESLRELAGKENLEYPSVTLPPQPHTKEGVDAYNEVIARVRMWVNLNLWQKLKLSRDDAKPLLRLKGFPSFPLVERQANEVDWWDMVCNVKKLINEKKEDGKVFWQNLAGYKRQEALRPYLSSEEDRKKGKKFARYQLGDLLLHLEKKHGEDWGKVYDEAWERIDKKVEGLSKHIKLEEERRSEDAQSKAALTDWLRAKASFVIEGLKEADKDEFCRCELKLQKWYGDLRGKPFAIEAENSILDISGFSKQYNCAFIWQKDGVKKLNLYLIINYFKGGKLRFKKIKPEAFEANRFYTVINKKSGEIVPMEVNFNFDDPNLIILPLAFGKRQGREFIWNDLLSLETGSLKLANGRVIEKTLYNRRTRQDEPALFVALTFERREVLDSSNIKPMNLIGVDRGENIPAVIALTDPEGCPLSRFKDSLGNPTHILRIGESYKEKQRTIQAKKEVEQRRAGGYSRKYASKAKNLADDMVRNTARDLLYYAVTQDAMLIFENLSRGFGRQGKRTFMAERQYTRMEDWLTAKLAYEGLPSKTYLSKTLAQYTSKTCSNCGFTITSADYDRVLEKLKKTATGWMTTINGKELKVEGQITYYNRYKRQNVVKDLSVELDRLSEESVNNDISSWTKGRSGEALSLLKKRFSHRPVQEKFVCLNCGFETHADEQAALNIARSWLFLRSQEYKKYQTNKTTGNTDKRAFVETWQSFYRKKLKEVWKPAV

SEQ ID NO: 2480 - protein, 978 aa, synthetic construct; identical to SEQ ID NO: 203

SEQ ID NO: 2481 - protein, 979 aa, synthetic construct
QEIKRINKIRRRLVKDSNTKKAGKTGPMKTLLVRVMTPDLRERLENLRKKPENIPQPISNTSRANLNKLLTDYTEMKKAILHVYWEEFQKDPVGLMSRVAQPASKKIDQNKLKPEMDEKGNLTTAGFACSQCGQPLFVYKLEQVSEKGKAYTNYFGRCNVAEHEKLILLAQLKPEKDSDEAVTYSLGKFGQRALDFYSIHVTKESTHPVKPLAQIAGNRYASGPVGKALSDACMGTIASFLSKYQDIIIEHQKVVKGNQKRLESLRELAGKENLEYPSVTLPPQPHTKEGVDAYNEVIARVRMWVNLNLWQKLKLSRDDAKPLLRLKGFPSFPLVERQANEVDWWDMVCNVKKLINEKKEDGKVFWQNLAGYKRQEALRPYLSSEEDRKKGKKFARYQLGDLLLHLEKKHGEDWGKVYDEAWERIDKKVEGLSKHIKLEEERRSEDAQSKAALTDWLRAKASFVIEGLKEADKDEFCRCELKLQKWYGDLRGKPFAIEAENSILDISGFSKQYNCAFIWQKDGVKKLNLYLIINYFKGGKLRFKKIKPEAFEANRFYTVINKKSGEIVPMEVNFNFDDPNLIILPLAFGKRQGREFIWNDLLSLETGSLKLANGRVIEKTLYNRRTRQDEPALFVALTFERAREVLDSSNIKPMNLIGVDRGENIPAVIALTDPEGCPLSRFKDSLGNPTHILRIGESYKEKQRTIQAKKEVEQRRAGGYSRKYASKAKNLADDMVRNTARDLLYYAVTQDAMLIFENLSRGFGRQGKRTFMAERQYTRMEDWLTAKLAYEGLPSKTYLSKTLAQYTSKTCSNCGFTITSADYDRVLEKLKKTATGWMTTINGKELKVEGQITYYNRYKRQNVVKDLSVELDRLSEESVNNDISSWTKGRSGEALSLLKKRFSHRPVQEKFVCLNCGFETHADEQAALNIARSWLFLRSQEYKKYQTNKTTGNTDKRAFVETWQSFYRKKLKEVWKPAV

SEQ ID NO: 2482 - protein, 978 aa, synthetic construct
QEIKRINKIRRRLVKDSNTKKAGKTGPMKTLLVRVMTPDLRERLENLRKKPENIPQPISNTSRANLNKLLTDYTEMKKAILHVYWEEFQKDPVGLMSRVAQPASKKIDQNKLKPEMDEKGNLTTAGFACSQCGQPLFVYKLEQVSEKGKAYTNYFGRCNVAEHEKLILLAQLKPEKDSDEAVTYSLGKFGQRALDFYSIHVTKESTHPVKPLAQIAGNRYASGPVGKALSDACMLTIASFLSKYQDIIIEHQKVVKGNQKRLESLRELAGKENLEYPSVTLPPQPHTKEGVDAYNEVIARVRMWVNLNLWQKLKLSRDDAKPLLRLKGFPSFPLVERQANEVDWWDMVCNVKKLINEKKEDGKVFWQNLAGYKRQEALRPYLSSEEDRKKGKKFARYQLGDLLLHLEKKHGEDWGKVYDEAWERIDKKVEGLSKHIKLEEERRSEDAQSKAALTDWLRAKASFVIEGLKEADKDEFCRCELKLQKWYGDLRGKPFAIEAENSILDISGFSKQYNCAFIWQKDGVKKLNLYLIINYFKGGKLRFKKIKPEAFEANRFYTVINKKSGEIVPMEVNFNFDDPNLIILPLAFGKRQGREFIWNDLLSLETGSLKLANGRVIEKTLYNRRTRQDEPALFVALTFERREVLDSSNIKPMNLIGVDRGENIPAVIALTDPEGCPLSRFKDSLGNPTHILRIGESYKEKQRTIQAKKEVEQRRAGGYSRKYASKAKNLADDMVRNTARDLLYYAVTQDAMLIFENLSRGFGRQGKRTFMAERQYTRMEDWLTAKLAYEGLPSKTYLSKTLAQYTSKTCSNCGFTITSADYDRVLEKLKKTATGWMTTINGKELKVEGQITYYNRYKRQNVVKDLSVELDRLSEESVNNDISSWTKGRSGEALSLLKKRFSHRPVQEKFVCLNCGFETHADEQAALNIARSWLFLRSQEYKKYQTNKTTGNTDKRAFVETWQSFYRKKLKEVWKPAV

SEQ ID NO: 2483 - protein, 978 aa, synthetic construct
QEIKRINKIRRRLVKDSNTKKAGKTGPMKTLLVRVMTPDLRERLENLRKKPENIPQPISNTSRANLNKLLTDYTEMKKAILHVYWEEFQKDPVGLMSRVAQPASKKIDQNKLKPEMDEKGNLTTAGFACSQCGQPLFVYKLEQVSEKGKAYTNYFGRCNVAEHEKLILLAQLKPEKDSDEAVTYSLGKFGQRALDFYSIHVTKESTHPVKPLAQIAGNRYASGPVGKALSDACMHTIASFLSKYQDIIIEHQKVVKGNQKRLESLRELAGKENLEYPSVTLPPQPHTKEGVDAYNEVIARVRMWVNLNLWQKLKLSRDDAKPLLRLKGFPSFPLVERQANEVDWWDMVCNVKKLINEKKEDGKVFWQNLAGYKRQEALRPYLSSEEDRKKGKKFARYQLGDLLLHLEKKHGEDWGKVYDEAWERIDKKVEGLSKHIKLEEERRSEDAQSKAALTDWLRAKASFVIEGLKEADKDEFCRCELKLQKWYGDLRGKPFAIEAENSILDISGFSKQYNCAFIWQKDGVKKLNLYLIINYFKGGKLRFKKIKPEAFEANRFYTVINKKSGEIVPMEVNFNFDDPNLIILPLAFGKRQGREFIWNDLLSLETGSLKLANGRVIEKTLYNRRTRQDEPALFVALTFERREVLDSSNIKPMNLIGVDRGENIPAVIALTDPEGCPLSRFKDSLGNPTHILRIGESYKEKQRTIQAKKEVEQRRAGGYSRKYASKAKNLADDMVRNTARDLLYYAVTQDAMLIFENLSRGFGRQGKRTFMAERQYTRMEDWLTAKLAYEGLPSKTYLSKTLAQYTSKTCSNCGFTITSADYDRVLEKLKKTATGWMTTINGKELKVEGQITYYNRYKRQNVVKDLSVELDRLSEESVNNDISSWTKGRSGEALSLLKKRFSHRPVQEKFVCLNCGFETHADEQAALNIARSWLFLRSQEYKKYQTNKTTGNTDKRAFVETWQSFYRKKLKEVWKPAV

SEQ ID NO: 2484 - protein, 978 aa, synthetic construct
QEIKRINKIRRRLVKDSNTKKAGKTGPMKTLLVRVMTPDLRERLENLRKKPENIPQPISNTSRANLNKLLTDYTEMKKAILHVYWEEFQKDPVGLMSRVAQPASKKIDQNKLKPEMDEKGNLTTAGFACSQCGQPLFVYKLEQVSEKGKAYTNYFGRCNVAEHEKLILLAQLKPEKDSDEAVTYSLGKFGQRALDFYSIHVTKESTHPVKPLAQIAGNRYASGPVGKALSDACMGTIASFLSKYQDIIIEHQKVVKGNQKRLESLRELAGKENLEYPSVTLPPQPHTKEGVDAYNEVIARVRMWVNLNLWQKLKLSRDDAKPLLRLKGFPSFPLVERQANEVDWWDMVCNVKKLINEKKEDGKVFWQNLAGYKRQEALRPYLSSEEDRKKGKKFARYQLGDLLLHLEKKHGEDWGKVYDEAWERIDKKVEGLSKHIKLEEERRSEDAQSKAALTDWLRAKASFVIEGLKEADKDEFCRCELKLQKWYGDLRGKPFAIEAENSILDISGFSKQYNCAFIWQKDGVKKLNLYLIINYFKGGKLRFKKIKPEAFEANRFYTVINKKSGEIVPMEVNFNFDDPNLIILPLAFGKRQGREFIWNDLLSLETGSLKLANGRVIEKTLYNRRTRQDEPALFVALTFERREVLDSSNIKPMNLIGVDRGENIPAVIALTDPEGCPLSRFKDSLGNPTHILRIGESYKEKQRTIQAKKEVEQRRAGGYSRKYASKAKNLADDMVRNTARDLLYYAVTQDAMLIFENLSRGFGRQGKRTFMAERQYTRMEDWLTAKLAYEGLPSKTYLSKTLAQYTSKTCSNCGFTITSADYDRVLEKLKKTATGWMTTINGKELKVEGQITYYNRYKRQNVVKDLSVELDRLSEESVNNDISSWTKGRSGEALSLLKKRFSHRPTQEKFVCLNCGFETHADEQAALNIARSWLFLRSQEYKKYQTNKTTGNTDKRAFVETWQSFYRKKLKEVWKPAV

SEQ ID NO: 2485 - protein, 978 aa, synthetic construct
QEIKRINKIRRRLVKDSNTKKAGKTGPMKTLLVRVMTPDLRERLENLRKKPENIPQPISNTSRANLNKLLTDYTEMKKAILHVYWEEFQKDPVGLMSRVAQPASKKIDQNKLKPEMDEKGNLTTAGFACSQCGQPLFVYKLEQVSEKGKAYTNYFGRCNVAEHEKLILLAQLKPEKDSDEAVTYSLGKFGQRALDFYSIHVTKESTHPVKPLAQIAGNRYASGPVGKALSDACMGTIASFLSKYQDIIIEHQKVVKGNQKRLESLRELAGKENLEYPSVTLPPQPHTKEGVDAYNEVIARVRMWVNLNLWQKLKLSRDDAKPLLRLKGFPSFPLVERQANEVDWWDMVCNVKKLINEKKEDGKVFWQNLAGYKRQEALRPYLSSEEDRKKGKKFARYQLGDLLLHLEKKHGEDWGKVYDEAWERIDKKVEGLSKHIKLEEERRSEDAQSKAALTDWLRAKASFVIEGLKEADKDEFCRCELKLQKWYGDLRGKPFAIEAENSILDISGFSKQYNCAFIWQKDGVKKLNLYLIINYFKGGKLEFKKIKPEAFEANRFYTVINKKSGEIVPMEVNFNFDDPNLIILPLAFGKRQGREFIWNDLLSLETGSLKLANGRVIEKTLYNRRTRQDEPALFVALTFERREVLDSSNIKPMNLIGVDRGENIPAVIALTDPEGCPLSRFKDSLGNPTHILRIGESYKEKQRTIQAKKEVEQRRAGGYSRKYASKAKNLADDMVRNTARDLLYYAVTQDAMLIFENLSRGFGRQGKRTFMAERQYTRMEDWLTAKLAYEGLPSKTYLSKTLAQYTSKTCSNCGFTITSADYDRVLEKLKKTATGWMTTINGKELKVEGQITYYNRYKRQNVVKDLSVELDRLSEESVNNDISSWTKGRSGEALSLLKKRFSHRPVQEKFVCLNCGFETHADEQAALNIARSWLFLRSQEYKKYQTNKTTGNTDKRAFVETWQSFYRKKLKEVWKPAV

SEQ ID NO: 2486 - protein, 977 aa, synthetic construct
QEIKRINKIRRRLVKDSNTKKAGKTGPMKTLLVRVMTPDLRERLENLRKKPENIPQPISNTSRANLNKLLTDYTEMKKAILHVYWEEFQKDPVGLMSRVAQPASKKIDQNKLKPEMDEKGNLTTAGFACSQCGQPLFVYKLEQVSEKGKAYTNYFGRCNVAEHEKLILLAQLKPEKDSDEAVTYSLGKFGQRALDFYSIHVTKESTHPVKPLAQIAGNRYASGPVGKALSDACMGTIASFLSKYQDIIIEHQKVVKGNQKRLESLRELAGKENLEYPSVTLPPQPHTKEGVDAYNEVIARVRMWVNLNLWQKLKLSRDDAKPLLRLKGFPSFPLVERQANEVDWWDMVCNVKKLINEKKEDGKVFWQNLAGYKRQEALRPYLSSEEDRKKGKKFARYQLGDLLLHLEKKHGEDWGKVYDEAWERIDKKVEGLSKHIKLEEERRSEDAQSKAALTDWLRAKASFVIEGLKEADKDEFCRCELKLQKWYGDLRGKPFAIEAENSILDISGFSKQYNCAFIWQKDGVKKLNLYLIINYFKGGKLRFKKIKPEAFEANRFYTVINKSGEIVPMEVNFNFDDPNLIILPLAFGKRQGREFIWNDLLSLETGSLKLANGRVIEKTLYNRRTRQDEPALFVALTFERREVLDSSNIKPMNLIGVDRGENIPAVIALTDPEGCPLSRFKDSLGNPTHILRIGESYKEKQRTIQAKKEVEQRRAGGYSRKYASKAKNLADDMVRNTARDLLYYAVTQDAMLIFENLSRGFGRQGKRTFMAERQYTRMEDWLTAKLAYEGLPSKTYLSKTLAQYTSKTCSNCGFTITSADYDRVLEKLKKTATGWMTTINGKELKVEGQITYYNRYKRQNVVKDLSVELDRLSEESVNNDISSWTKGRSGEALSLLKKRFSHRPVQEKFVCLNCGFETHADEQAALNIARSWLFLRSQEYKKYQTNKTTGNTDKRAFVETWQSFYRKKLKEVWKPAV

SEQ ID NO: 2487 - protein, 979 aa, synthetic construct
QEIKRINKIRRRLVKDSNTKKAGKTGPMKTLLVRVMTPDLRERLENLRKKPENIPQPISNTSRANLNKLLTDYTEMKKAILHVYWEEFQKDPVGLMSRVAQPASKKIDQNKLKPEMDEKGNLTTAGFACSQCGQPLFVYKLEQVSEKGKAYTNYFGRCNVAEHEKLILLAQLKPEKDSDEAVTYSLGKFGQRALDFYSIHVTKESTHPVKPLAQIAGNRYASGPVGKALSDACMGTIASFLSKYQDIIIEHQKVVKGNQKRLESLRELAGKENLEYPSVTLPPQPHTKEGVDAYNEVIARVRMWVNLNLWQKLKLSRDDAKPLLRLKGFPSFPLVERQANEVDWWDMVCNVKKLINEKKEDGKVFWQNLAGYKRQEALRPYLSSEEDRKKGKKFARYQLGDLLLHLEKKHGEDWGKVYDEAWERIDKKVEGLSKHIKLEEERRSEDAQSKAALTDWLRAKASFVIEGLKEADKDEFCRCELKLQKWYGDLRGKPFAIEAENSILDISGFSKQYNCAFIWQKDGVKKLNLYLIINYFKGGKLRFKKIKPEAFEANRFYTVINKKSGEIVPMEVNFNFDDPNLIILPLAFGKRQAGREFIWNDLLSLETGSLKLANGRVIEKTLYNRRTRQDEPALFVALTFERREVLDSSNIKPMNLIGVDRGENIPAVIALTDPEGCPLSRFKDSLGNPTHILRIGESYKEKQRTIQAKKEVEQRRAGGYSRKYASKAKNLADDMVRNTARDLLYYAVTQDAMLIFENLSRGFGRQGKRTFMAERQYTRMEDWLTAKLAYEGLPSKTYLSKTLAQYTSKTCSNCGFTITSADYDRVLEKLKKTATGWMTTINGKELKVEGQITYYNRYKRQNVVKDLSVELDRLSEESVNNDISSWTKGRSGEALSLLKKRFSHRPVQEKFVCLNCGFETHADEQAALNIARSWLFLRSQEYKKYQTNKTTGNTDKRAFVETWQSFYRKKLKEVWKPAV

SEQ ID NO: 2488 - protein, 979 aa, synthetic construct
QEIKRINKIRRRLVKDSNTKKAGKTGPMKTLLVRVMTPDLRERLENLRKKPENIPQPISNTSRANLNKLLTDYTEMKKAILHVYWEEFQKDPVGLMSRVAQPASKKIDQNKLKPEMDEKGNLTTAGFACSQCGQPLFVYKLEQVSEKGKAYTNYFGRCNVAEHEKLILLAQLKPEKDSDEAVTYSLGKFGQRALDFYSIHVTKESTHPVKPLAQIAGNRYASGPVGKALSDACMGTIASFLSKYQDIIIEHQKVVKGNQKRLESLRELAGKENLEYPSVTLPPQPHTKEGVDAYNEVIARVRMWVNLNLWQKLKLSRDDAKPLLRLKGFPSFPLVERQANEVDWWDMVCNVKKLINEKKEDGKVFWQNLAGYKRQEALRPYLSSEEDRKKGKKFARYQLGDLLLHLEKKHGEDWGKVYDEAWERIDKKVEGLSKHIKLEKEERRSEDAQSKAALTDWLRAKASFVIEGLKEADKDEFCRCELKLQKWYGDLRGKPFAIEAENSILDISGFSKQYNCAFIWQKDGVKKLNLYLIINYFKGGKLRFKKIKPEAFEANRFYTVINKKSGEIVPMEVNFNFDDPNLIILPLAFGKRQGREFIWNDLLSLETGSLKLANGRVIEKTLYNRRTRQDEPALFVALTFERREVLDSSNIKPMNLIGVDRGENIPAVIALTDPEGCPLSRFKDSLGNPTHILRIGESYKEKQRTIQAKKEVEQRRAGGYSRKYASKAKNLADDMVRNTARDLLYYAVTQDAMLIFENLSRGFGRQGKRTFMAERQYTRMEDWLTAKLAYEGLPSKTYLSKTLAQYTSKTCSNCGFTITSADYDRVLEKLKKTATGWMTTINGKELKVEGQITYYNRYKRQNVVKDLSVELDRLSEESVNNDISSWTKGRSGEALSLLKKRFSHRPVQEKFVCLNCGFETHADEQAALNIARSWLFLRSQEYKKYQTNKTTGNTDKRAFVETWQSFYRKKLKEVWKPAV

SEQ ID NO: 2489 - protein, 56 aa, synthetic construct; identical to SEQ ID NO: 2347

SEQ ID NO: 2490 - protein, 44 aa, synthetic construct; identical to SEQ ID NO: 2348

SEQ ID NO: 2491 - protein, 91 aa, synthetic construct; identical to SEQ ID NO: 2340

SEQ ID NO: 2492 - protein, 141 aa, synthetic construct; identical to SEQ ID NO: 2341

SEQ ID NO: 2493 - protein, 168 aa, synthetic construct
PLVERQANEVDWWDMVCNVKKLINEKKEDGKVFWQNLAGYKRQEALRPYLSSEEDRKKGKKFARYQLGDLLLHLEKKHGEDWGKVYDEAWERIDKKVEGLSKHIKLEEERRSEDAQSKAALTDWLRAKASFVIEGLKEADKDEFCRCELKLQKWYGDLRGKPFAIEAE

SEQ ID NO: 2494 - protein, 146 aa, synthetic construct; identical to SEQ ID NO: 2352

SEQ ID NO: 2495 - protein, 164 aa, synthetic construct
SSNIKPMNLIGVDRGENIPAVIALTDPEGCPLSRFKDSLGNPTHILRIGESYKEKQRTIQAKKEVEQRRAGGYSRKYASKAKNLADDMVRNTARDLLYYAVTQDAMLIFENLSRGFGRQGKRTFMAERQYTRMEDWLTAKLAYEGLPSKTYLSKTLAQYTSKTC

SEQ ID NO: 2496 - protein, 110 aa, synthetic construct; identical to SEQ ID NO: 2354

SEQ ID NO: 2497 - protein, 58 aa, synthetic construct; identical to SEQ ID NO: 2355

SEQ ID NO: 2498 - protein, 46 aa, synthetic construct
PKKKRKVGGSPKKKRKVSRQEIKRINKIRRRLVKDSNTKKAGKTGP

SEQ ID NO: 2499 - protein, 66 aa, synthetic construct
PKKKRKVGGSPKKKRKVGGSPKKKRKVGGSPKKKRKVSRQEIKRINKIRRRLVKDSNTKKAGKTGP

SEQ ID NO: 2500 - protein, 86 aa, synthetic construct
PKKKRKVGGSPKKKRKVGGSPKKKRKVGGSPKKKRKVGGSPKKKRKVGGSPKKKRKVSRQEIKRINKIRRRLVKDSNTKKAGKTGP

SEQ ID NO: 2501 - protein, 50 aa, synthetic construct
PAAKRVKLDGGSPAAKRVKLDSRQEIKRINKIRRRLVKDSNTKKAGKTGP

SEQ ID NO: 2502 - protein, 74 aa, synthetic construct
PAAKRVKLDGGSPAAKRVKLDGGSPAAKRVKLDGGSPAAKRVKLDSRQEIKRINKIRRRLVKDSNTKKAGKTGP

SEQ ID NO: 2503 - protein, 98 aa, synthetic construct
PAAKRVKLDGGSPAAKRVKLDGGSPAAKRVKLDGGSPAAKRVKLDGGSPAAKRVKLDGGSPAAKRVKLDSRQEIKRINKIRRRLVKDSNTKKAGKTGP

SEQ ID NO: 2504 - protein, 49 aa, synthetic construct
KRPAATKKAGQAKKKKSRDISRQEIKRINKIRRRLVKDSNTKKAGKTGP

SEQ ID NO: 2505 - protein, 45 aa, synthetic construct
KRPAATKKAGQAKKKKSRQEIKRINKIRRRLVKDSNTKKAGKTGP

SEQ ID NO: 2506 - protein, 68 aa, synthetic construct
KRPAATKKAGQAKKKKGGSKRPAATKKAGQAKKKKSRDISRQEIKRINKIRRRLVKDSNTKKAGKTGP

SEQ ID NO: 2507 - protein, 106 aa, synthetic construct
KRPAATKKAGQAKKKKGGSKRPAATKKAGQAKKKKGGSKRPAATKKAGQAKKKKGGSKRPAATKKAGQAKKKKSRDISRQEIKRINKIRRRLVKDSNTKKAGKTGP

SEQ ID NO: 2508 - protein, 144 aa, synthetic construct
KRPAATKKAGQAKKKKGGSKRPAATKKAGQAKKKKGGSKRPAATKKAGQAKKKKGGSKRPAATKKAGQAKKKKGGSKRPAATKKAGQAKKKKGGSKRPAATKKAGQAKKKKSRDISRQEIKRINKIRRRLVKDSNTKKAGKTGP

SEQ ID NO: 2509 - protein, 70 aa, synthetic construct
PKKKRKVGGSPKKKRKVGGSPKKKRKVGGSPKKKRKVSRDISRQEIKRINKIRRRLVKDSNTKKAGKTGP

SEQ ID NO: 2510 - protein, 70 aa, synthetic construct; identical to SEQ ID NO: 2509

SEQ ID NO: 2511 - protein, 78 aa, synthetic construct
PAAKRVKLDGGSPAAKRVKLDGGSPAAKRVKLDGGSPAAKRVKLDSRDISRQEIKRINKIRRRLVKDSNTKKAGKTGP

SEQ ID NO: 2512 - protein, 102 aa, synthetic construct
PAAKRVKLDGGSPAAKRVKLDGGSPAAKRVKLDGGSPAAKRVKLDGGSPAAKRVKLDGGSPAAKRVKLDSRDISRQEIKRINKIRRRLVKDSNTKKAGKTGP

SEQ ID NO: 2513 - protein, 49 aa, synthetic construct; identical to SEQ ID NO: 2504

SEQ ID NO: 2514 - protein, 68 aa, synthetic construct; identical to SEQ ID NO: 2506

SEQ ID NO: 2515 - protein, 65 aa, synthetic construct
PAAKRVKLDGGKRTADGSEFESPKKKRKVGGSSRDISRQEIKRINKIRRRLVKDSNTKKAGKTGP

SEQ ID NO: 2516 - protein, 67 aa, synthetic construct
PAAKRVKLDGGKRTADGSEFESPKKKRKVPPPPGSRDISRQEIKRINKIRRRLVKDSNTKKAGKTGP

SEQ ID NO: 2517 - protein, 72 aa, synthetic construct
PAAKRVKLDGGKRTADGSEFESPKKKRKVGIHGVPAAPGSRDISRQEIKRINKIRRRLVKDSNTKKAGKTGP

SEQ ID NO: 2518 - protein, 72 aa, synthetic construct
PAAKRVKLDGGKRTADGSEFESPKKKRKVGGGSGGGSPGSRDISRQEIKRINKIRRRLVKDSNTKKAGKTGP

SEQ ID NO: 2519 - protein, 73 aa, synthetic construct
PAAKRVKLDGGKRTADGSEFESPKKKRKVPGGGSGGGSPGSRDISRQEIKRINKIRRRLVKDSNTKKAGKTGP

SEQ ID NO: 2520 - protein, 81 aa, synthetic construct
PAAKRVKLDGGKRTADGSEFESPKKKRKVAEAAAKEAAAKEAAAKAPGSRDISRQEIKRINKIRRRLVKDSNTKKAGKTGP

SEQ ID NO: 2521 - protein, 64 aa, synthetic construct
PAAKRVKLDGGKRTADGSEFESPKKKRKVPGSRDISRQEIKRINKIRRRLVKDSNTKKAGKTGP

SEQ ID NO: 2522 - protein, 55 aa, synthetic construct
PAAKRVKLDGGSPKKKRKVGGSSRDISRQEIKRINKIRRRLVKDSNTKKAGKTGP

SEQ ID NO: 2523 - protein, 54 aa, synthetic construct
PAAKRVKLDPPPPKKKRKVPGSRDISRQEIKRINKIRRRLVKDSNTKKAGKTGP

SEQ ID NO: 2524 - protein, 45 aa, synthetic construct
PAAKRVKLDPGRSRDISRQEIKRINKIRRRLVKDSNTKKAGKTGP

SEQ ID NO: 2525 - protein, 40 aa, synthetic construct
PKKKRKVSRDISRQEIKRINKIRRRLVKDSNTKKAGKTGP

SEQ ID NO: 2526 - protein, 65 aa, synthetic construct; identical to SEQ ID NO: 2515

SEQ ID NO: 2527 - protein, 72 aa, synthetic construct; identical to SEQ ID NO: 2518

SEQ ID NO: 2528 - protein, 36 aa, synthetic construct
PKKKRKVSRQEIKRINKIRRRLVKDSNTKKAGKTGP

SEQ ID NO: 2529 - protein, 66 aa, synthetic construct; identical to SEQ ID NO: 2499

SEQ ID NO: 2530 - protein, 86 aa, synthetic construct; identical to SEQ ID NO: 2500

SEQ ID NO: 2531 - protein, 38 aa, synthetic construct
PAAKRVKLDSRQEIKRINKIRRRLVKDSNTKKAGKTGP

SEQ ID NO: 2532 - protein, 50 aa, synthetic construct; identical to SEQ ID NO: 2501

SEQ ID NO: 2533 - protein, 74 aa, synthetic construct; identical to SEQ ID NO: 2502

SEQ ID NO: 2534 - protein, 98 aa, synthetic construct; identical to SEQ ID NO: 2503

SEQ ID NO: 2535 - protein, 45 aa, synthetic construct; identical to SEQ ID NO: 2505

SEQ ID NO: 2536 - protein, 21 aa, synthetic construct
TSPKKKRKVALEYPYDVPDYA

SEQ ID NO: 2537 - protein, 33 aa, synthetic construct
TLESKRPAATKKAGQAKKKKAPGEYPYDVPDYA

SEQ ID NO: 2538 - protein, 27 aa, synthetic construct
GSKRPAATKKAGQAKKKKYPYDVPDYA

SEQ ID NO: 2539 - protein, 73 aa, synthetic construct
TLESKRPAATKKAGQAKKKKGGSKRPAATKKAGQAKKKKAPGEYPYDVPDYATSPKKKRKVALEYPYDVPDYA

SEQ ID NO: 2540 - protein, 98 aa, synthetic construct
TLESKRPAATKKAGQAKKKKGGSKRPAATKKAGQAKKKKGGSKRPAATKKAGQAKKKKGGSKRPAATKKAGQAKKKKTSPKKKRKVALEYPYDVPDYA

SEQ ID NO: 2541 - protein, 136 aa, synthetic construct
TLESKRPAATKKAGQAKKKKGGSKRPAATKKAGQAKKKKGGSKRPAATKKAGQAKKKKGGSKRPAATKKAGQAKKKKGGSKRPAATKKAGQAKKKKGGSKRPAATKKAGQAKKKKTSPKKKRKVALEYPYDVPDYA

SEQ ID NO: 2542 - protein, 74 aa, synthetic construct
TLESPKKKRKVGGSPKKKRKVGGSPKKKRKVGGSPKKKRKVTLESKRPAATKKAGQAKKKKAPGEYPYDVPDYA

SEQ ID NO: 2543 - protein, 68 aa, synthetic construct
TLESPKKKRKVGGSPKKKRKVGGSPKKKRKVGGSPKKKRKVGSKRPAATKKAGQAKKKKYPYDVPDYA

SEQ ID NO: 2544 - protein, 101 aa, synthetic construct
TLESPAAKRVKLDGGSPAAKRVKLDGGSPAAKRVKLDGGSPAAKRVKLDTLESKRPAATKKAGQAKKKKGGSKRPAATKKAGQAKKKKAPGEYPYDVPDYA

SEQ ID NO: 2545 - protein, 150 aa, synthetic construct
TLESPAAKRVKLDGGSPAAKRVKLDGGSPAAKRVKLDGGSPAAKRVKLDGGSPAAKRVKLDGGSPAAKRVKLDTLESKRPAATKKAGQAKKKKGGSKRPAATKKAGQAKKKKGGSKRPAATKKAGQAKKKKGGSKRPAATKKAGQAKKKK

SEQ ID NO: 2546 - protein, 135 aa, synthetic construct
TLESKRPAATKKAGQAKKKKTLESKRPAATKKAGQAKKKKGGSKRPAATKKAGQAKKKKGGSKRPAATKKAGQAKKKKGGSKRPAATKKAGQAKKKKGGSKRPAATKKAGQAKKKKGGSKRPAATKKAGQAKKKK

SEQ ID NO: 2547 - protein, 80 aa, synthetic construct
TLESKRPAATKKAGQAKKKKGGSKRPAATKKAGQAKKKKTLESPKKKRKVGGSPKKKRKVGGSPKKKRKVGGSPKKKRKV

SEQ ID NO: 2548 - protein, 54 aa, synthetic construct
TLEGGSPKKKRKVTLESPKKKRKVGGSPKKKRKVGGSPKKKRKVGGSPKKKRKV

SEQ ID NO: 2549 - protein, 62 aa, synthetic construct
TLEGGSPKKKRKVTLESPAAKRVKLDGGSPAAKRVKLDGGSPAAKRVKLDGGSPAAKRVKLD

SEQ ID NO: 2550 - protein, 86 aa, synthetic construct
TLEGGSPKKKRKVTLESPAAKRVKLDGGSPAAKRVKLDGGSPAAKRVKLDGGSPAAKRVKLDGGSPAAKRVKLDGGSPAAKRVKLD

SEQ ID NO: 2551 - protein, 33 aa, synthetic construct
TLEGGSPKKKRKVTLESKRPAATKKAGQAKKKK

SEQ ID NO: 2552 - protein, 52 aa, synthetic construct
TLEGGSPKKKRKVTLESKRPAATKKAGQAKKKKGGSKRPAATKKAGQAKKKK

SEQ ID NO: 2553 - protein, 26 aa, synthetic construct
TLEGGSPKKKRKVTLEGGSPKKKRKV

SEQ ID NO: 2554 - protein, 26 aa, synthetic construct
TLEGGSPKKKRKVTLEGGSPKKKRKV

SEQ ID NO: 2555 - protein, 26 aa, synthetic construct
TLEGGSPKKKRKVTLEGGSPKKKRKV

SEQ ID NO: 2556 - protein, 26 aa, synthetic construct
TLEGGSPKKKRKVTLEGGSPKKKRKV

SEQ ID NO: 2557 - protein, 26 aa, synthetic construct
TLEGGSPKKKRKVTLEGGSPKKKRKV

SEQ ID NO: 2558 - protein, 47 aa, synthetic construct
TLEVGPKRTADSQHSTPPKTKRKVEFEPKKKRKVTLEGGSPKKKRKV

SEQ ID NO: 2559 - protein, 53 aa, synthetic construct
TLEVGGGSGGGSKRTADSQHSTPPKTKRKVEFEPKKKRKVTLEGGSPKKKRKV

SEQ ID NO: 2560 - protein, 62 aa, synthetic construct
TLEVAEAAAKEAAAKEAAAKAKRTADSQHSTPPKTKRKVEFEPKKKRKVTLEGGSPKKKRKV

SEQ ID NO: 2561 - protein, 57 aa, synthetic construct
TLEVGPPKKKRKVGGSKRTADSQHSTPPKTKRKVEFEPKKKRKVTLEGGSPKKKRKV

SEQ ID NO: 2562 - protein, 45 aa, synthetic construct
TLEVGPAEAAAKEAAAKEAAAKAPAAKRVKLDTLEGGSPKKKRKV

SEQ ID NO: 2563 - protein, 61 aa, synthetic construct
TLEVGPGGGSGGGSGGGSPAAKRVKLDTLEVGPKRTADSQHSTPPKTKRKVEFEPKKKRKV

SEQ ID NO: 2564 - protein, 65 aa, synthetic construct
TLEVGPPKKKRKVPPPPAAKRVKLDTLEVGGGSGGGSKRTADSQHSTPPKTKRKVEFEPKKKRKV

SEQ ID NO: 2565 - protein, 64 aa, synthetic construct
TLEVGPPAAKRVKLDTLEVAEAAAKEAAAKEAAAKAKRTADSQHSTPPKTKRKVEFEPKKKRKV

SEQ ID NO: 2566 - protein, 78 aa, synthetic construct
TLEVGPKRTADSQHSTPPKTKRKVEFEPKKKRKVTLEVGPPKKKRKVGGSKRTADSQHSTPPKTKRKVEFEPKKKRKV

SEQ ID NO: 2567 - protein, 72 aa, synthetic construct
TLEVGGGSGGGSKRTADSQHSTPPKTKRKVEFEPKKKRKVTLEVGPAEAAAKEAAAKEAAAKAPAAKRVKLD

SEQ ID NO: 2568 - protein, 45 aa, synthetic construct
GSKRPAATKKAGQAKKKKTLEVGPGGGSGGGSGGGSPAAKRVKLD

SEQ ID NO: 2569 - protein, 43 aa, synthetic construct
GSKRPAATKKAGQAKKKKTLEVGPPKKKRKVPPPPAAKRVKLD

SEQ ID NO: 2570 - protein, 33 aa, synthetic construct
GSKRPAATKKAGQAKKKKTLEVGPPAAKRVKLD

SEQ ID NO: 2571 - protein, 43 aa, synthetic construct
GSPKKKRKVTLEVGPKRTADSQHSTPPKTKRKVEFEPKKKRKV

SEQ ID NO: 2572 - protein, 58 aa, synthetic construct
GSKRPAATKKAGQAKKKKTLEVGGGSGGGSKRTADSQHSTPPKTKRKVEFEPKKKRKV

SEQ ID NO: 2573 - protein, 36 aa, synthetic construct
GSKRPAATKKAGQAKKKKGSKRPAATKKAGQAKKKK

SEQ ID NO: 2574 - protein, 36 aa, synthetic construct; identical to SEQ ID NO: 2573

SEQ ID NO: 2575 - protein, 36 aa, synthetic construct; identical to SEQ ID NO: 2573

SEQ ID NO: 2576 - protein, 18 aa, synthetic construct
GSPKKKRKVGSPKKKRKV

SEQ ID NO: 2577 - protein, 54 aa, synthetic construct
GGGSGGGSKRTADSQHSTPPKTKRKVEFEPKKKRKVGSKRPAATKKAGQAKKKK

SEQ ID NO: 2578 - protein, 58 aa, synthetic construct
GPPKKKRKVGGSKRTADSQHSTPPKTKRKVEFEPKKKRKVGSKRPAATKKAGQAKKKK

SEQ ID NO: 2579 - protein, 44 aa, synthetic construct
TGGGPGGGAAAGSGSPKKKRKVGSGSGSKRPAATKKAGQAKKKK

SEQ ID NO: 2580 - protein, 48 aa, synthetic construct
GPKRTADSQHSTPPKTKRKVEFEPKKKRKVGSKRPAATKKAGQAKKKK

SEQ ID NO: 2581 - protein, 54 aa, synthetic construct
AEAAAKEAAAKEAAAKAKRTADSQHSTPPKTKRKVEFEPKKKRKVGSPKKKRKV

SEQ ID NO: 2582 - protein, 57 aa, synthetic construct
GPPKKKRKVPPPPAAKRVKLDGGGSGGGSKRTADSQHSTPPKTKRKVEFEPKKKRKV

SEQ ID NO: 2583 - protein, 111 aa, synthetic construct
GSPAAKRVKLDGGSPAAKRVKLDGGSPAAKRVKLDGGSPAAKRVKLDGGSPAAKRVKLDGGSPAAKRVKLDGPPKKKRKVGGSKRTADSQHSTPPKTKRKVEFEPKKKRKV

SEQ ID NO: 2584 - protein, 67 aa, synthetic construct
GSPAAKRVKLGGSPAAKRVKLGGSPKKKRKVGGSPKKKRKVTGGGPGGGAAAGSGSPKKKRKVGSGS

SEQ ID NO: 2585 - protein, 67 aa, synthetic construct
GSKRPAATKKAGQAKKKKGGSKRPAATKKAGQAKKKKGPKRTADSQHSTPPKTKRKVEFEPKKKRKV

SEQ ID NO: 2586 - protein, 82 aa, synthetic construct
GSKRPAATKKAGQAKKKKGGSKRPAATKKAGQAKKKKAEAAAKEAAAKEAAAKAKRTADSQHSTPPKTKRKVEFEPKKKRKV

SEQ ID NO: 2587 - protein, 21 aa, synthetic construct
GPPKKKRKVPPPPAAKRVKLD

SEQ ID NO: 2588 - protein, 71 aa, synthetic construct; identical to SEQ ID NO: 579

SEQ ID NO: 2589 - protein, 41 aa, synthetic construct; identical to SEQ ID NO: 582

SEQ ID NO: 2590 - protein, 37 aa, synthetic construct
GSKRPAATKKAGQAKKKKGGSKRPAATKKAGQAKKKK

SEQ ID NO: 2591 - protein, 37 aa, synthetic construct; identical to SEQ ID NO: 2590

SEQ ID NO: 2592 - RNA, 164 nt, synthetic construct
  source 1..164: mol_type = other RNA
gcctaggcaacagaaggctaaagaaggtatattgctgttgacagtgagcgacgctgatcatcaattacttactgtgaagccacagatgggtaagtaattgatgatcagcgctgcctactgcctcggacttcaaggggctactttaggagcaattatcttttttt

SEQ ID NO: 2593 - RNA, 167 nt, synthetic construct
  source 1..167: mol_type = other RNA
gcctaggcaacagaaggctcgagaaggtatattgctgttgacagtgagcgtgtacctgatcatcaattactttagtgaagccacagatgtaaagtaattgatgatcaggtacatgcctactgcctcggacttcaagggggctactttaggagcaattatcttttttt

SEQ ID NO: 2594 - RNA, 168 nt, synthetic construct
  source 1..168: mol_type = other RNA
gcctaggcaacagaatgctaaagaaggtatattgctgttgacagtgagcgacaagtaattgatgatcaggtacactgtgaagccacagatgggtgtacctgaatcaattacttgctgcctactgcctcggacttcaaggggctactttaggagcaattatcttttttt

SEQ ID NO: 2595 - RNA, 167 nt, synthetic construct
  source 1..167: mol_type = other RNA
gcctaggcaacagaaggctcgagaaggtatattgctgttgacagtgagcgtgtacctgatcatcaattactttagtgaagccacagatgtaaagtaattgatgatcaggtacatgcctactgcctcggaattcaagggggctactttaggagcaattatcttttttt

SEQ ID NO: 2596 - RNA, 164 nt, synthetic construct
  source 1..164: mol_type = other RNA
gcctaggcaacagaaggctaaagaaggtatattgctgttgacagtgagcgacgcaactgcgccttcatttactgtgaagccacagatgggtaaatgaaggcgcagttgcgctgcctactgcctcggacttcaaggggctactttaggagcaattatcttttttt

SEQ ID NO: 2597 - RNA, 167 nt, synthetic construct
  source 1..167: mol_type = other RNA
gcctaggcaacagaaggctcgagaaggtatattgctgttgacagtgagcgcagtacaactgcgccttcattttagtgaagccacagatgtaaaatgaaggcgcagttgtactgtgcctactgcctcggacttcaagggggctactttaggagcaattatcttttttt

SEQ ID NO: 2598 - RNA, 168 nt, synthetic construct
  source 1..168: mol_type = other RNA
gcctaggcaacagaatgctaaagaaggtatattgctgttgacagtgagcgacaaatgaaggcgcagttgtactgctgtgaagccacagatgggcagtacaaccgccttcatttgctgcctactgcctcggacttcaaggggctactttaggagcaattatcttttttt

SEQ ID NO: 2599 - RNA, 167 nt, synthetic construct
  source 1..167: mol_type = other RNA
gcctaggcaacagaaggctcgagaaggtatattgctgttgacagtgagcgcagtacaactgcgccttcattttagtgaagccacagatgtaaaatgaaggcgcagttgtactgtgcctactgcctcggaattcaagggggctactttaggagcaattatcttttttt

SEQ ID NO: 2600 - RNA, 164 nt, synthetic construct
  source 1..164: mol_type = other RNA
gcctaggcaacagaaggctaaagaaggtatattgctgttgacagtgagcgacgctgagcaagcacattaaactgtgaagccacagatgggtttaatgtgcttgctcagcgctgcctactgcctcggacttcaaggggctactttaggagcaattatcttttttt

SEQ ID NO: 2601 - RNA, 167 nt, synthetic construct
  source 1..167: mol_type = other RNA
gcctaggcaacagaaggctcgagaaggtatattgctgttgacagtgagcgaaggcctgagcaagcacattaatagtgaagccacagatgtattaatgtgcttgctcaggcctttgcctactgcctcggacttcaagggggctactttaggagcaattatcttttttt

SEQ ID NO: 2602 - RNA, 168 nt, synthetic construct
  source 1..168: mol_type = other RNA
gcctaggcaacagaatgctaaagaaggtatattgctgttgacagtgagcgacttaatgtgcttgctcaggccttctgtgaagccacagatgggaaggcctgaaagcacattaagctgcctactgcctcggacttcaaggggctactttaggagcaattatcttttttt

SEQ ID NO: 2603 - RNA, 167 nt, synthetic construct
  source 1..167: mol_type = other RNA
gcctaggcaacagaaggctcgagaaggtatattgctgttgacagtgagcgaaggcctgagcaagcacattaatagtgaagccacagatgtattaatgtgcttgctcaggcctttgcctactgcctcggaattcaagggggctactttaggagcaattatcttttttt

SEQ ID NO: 2604 - RNA, 164 nt, synthetic construct
  source 1..164: mol_type = other RNA
gcctaggcaacagaaggctaaagaaggtatattgctgttgacagtgagcgacgcctgatcatcaattactactgtgaagccacagatgggtagtaattgatgatcaggcgctgcctactgcctcggacttcaaggggctactttaggagcaattatcttttttt

SEQ ID NO: 2605 - RNA, 167 nt, synthetic construct
  source 1..167: mol_type = other RNA
gcctaggcaacagaaggctcgagaaggtatattgctgttgacagtgagcgctgtacctgatcatcaattacttagtgaagccacagatgtaagtaattgatgatcaggtacagtgcctactgcctcggacttcaagggggctactttaggagcaattatcttttttt

SEQ ID NO: 2606 - RNA, 168 nt, synthetic construct
  source 1..168: mol_type = other RNA
gcctaggcaacagaatgctaaagaaggtatattgctgttgacagtgagcgacagtaattgatgatcaggtacagctgtgaagccacagatgggctgtacctgcatcaattactgctgcctactgcctcggacttcaaggggctactttaggagcaattatcttttttt

SEQ ID NO: 2607 - RNA, 167 nt, synthetic construct
  source 1..167: mol_type = other RNA
gcctaggcaacagaaggctcgagaaggtatattgctgttgacagtgagcgctgtacctgatcatcaattacttagtgaagccacagatgtaagtaattgatgatcaggtacagtgcctactgcctcggaattcaagggggctactttaggagcaattatcttttttt

SEQ ID NO: 2608 - RNA, 164 nt, synthetic construct
  source 1..164: mol_type = other RNA
gcctaggcaacagaaggctaaagaaggtatattgctgttgacagtgagcgacggtacctgatcatcaattactgtgaagccacagatgggtaattgatgatcaggtaccgctgcctactgcctcggacttcaaggggctactttaggagcaattatcttttttt

SEQ ID NO: 2609 - RNA, 167 nt, synthetic construct
  source 1..167: mol_type = other RNA
gcctaggcaacagaaggctcgagaaggtatattgctgttgacagtgagcgaacctgtacctgatcatcaatttagtgaagccacagatgtaaattgatgatcaggtacaggtttgcctactgcctcggacttcaagggggctactttaggagcaattatcttttttt

SEQ ID NO: 2610 - RNA, 168 nt, synthetic construct
  source 1..168: mol_type = other RNA
gcctaggcaacagaatgctaaagaaggtatattgctgttgacagtgagcgacaattgatgatcaggtacaggttctgtgaagccacagatgggaacctgtacgatcatcaattgctgcctactgcctcggacttcaaggggctactttaggagcaattatcttttttt

SEQ ID NO: 2611 - RNA, 167 nt, synthetic construct
  source 1..167: mol_type = other RNA
gcctaggcaacagaaggctcgagaaggtatattgctgttgacagtgagcgaacctgtacctgatcatcaatttagtgaagccacagatgtaaattgatgatcaggtacaggtttgcctactgcctcggaattcaagggggctactttaggagcaattatcttttttt

SEQ ID NO: 2612 - RNA, 164 nt, synthetic construct
  source 1..164: mol_type = other RNA
gcctaggcaacagaaggctaaagaaggtatattgctgttgacagtgagcgacgttcatttggcagaaagaactgtgaagccacagatgggttctttctgccaaatgaacgctgcctactgcctcggacttcaaggggctactttaggagcaattatcttttttt

SEQ ID NO: 2613 - RNA, 167 nt, synthetic construct
  source 1..167: mol_type = other RNA
gcctaggcaacagaaggctcgagaaggtatattgctgttgacagtgagcggcgccttcatttggcagaaagatagtgaagccacagatgtatctttctgccaaatgaaggcgctgcctactgcctcggacttcaagggggctactttaggagcaattatcttttttt

SEQ ID NO: 2614 - RNA, 168 nt, synthetic construct
  source 1..168: mol_type = other RNA
gcctaggcaacagaatgctaaagaaggtatattgctgttgacagtgagcgactctttctgccaaatgaaggcgcctgtgaagccacagatggggcgccttcatggcagaaagagctgcctactgcctcggacttcaaggggctactttaggagcaattatcttttttt

SEQ ID NO: 2615 - RNA, 167 nt, synthetic construct
  source 1..167: mol_type = other RNA
gcctaggcaacagaaggctcgagaaggtatattgctgttgacagtgagcggcgccttcatttggcagaaagatagtgaagccacagatgtatctttctgccaaatgaaggcgctgcctactgcctcggaattcaagggggctactttaggagcaattatcttttttt

SEQ ID NO: 2616 - RNA, 164 nt, synthetic construct
  source 1..164: mol_type = other RNA
gcctaggcaacagaaggctaaagaaggtatattgctgttgacagtgagcgacgcatcaattacttcaaagactgtgaagccacagatgggtctttgaagtaattgatgcgctgcctactgcctcggacttcaaggggctactttaggagcaattatcttttttt

SEQ ID NO: 2617 - RNA, 167 nt, synthetic construct
  source 1..167: mol_type = other RNA
gcctaggcaacagaaggctcgagaaggtatattgctgttgacagtgagcgctgatcatcaattacttcaaagtagtgaagccacagatgtactttgaagtaattgatgatcagtgcctactgcctcggacttcaagggggctactttaggagcaattatcttttttt

SEQ ID NO: 2618 - RNA, 168 nt, synthetic construct
  source 1..168: mol_type = other RNA
gcctaggcaacagaatgctaaagaaggtatattgctgttgacagtgagcgacctttgaagtaattgatgatcagctgtgaagccacagatgggctgatcatcttacttcaaaggctgcctactgcctcggacttcaaggggctactttaggagcaattatcttttttt

SEQ ID NO: 2619 - RNA, 167 nt, synthetic construct
  source 1..167: mol_type = other RNA
gcctaggcaacagaaggctcgagaaggtatattgctgttgacagtgagcgctgatcatcaattacttcaaagtagtgaagccacagatgtactttgaagtaattgatgatcagtgcctactgcctcggaattcaagggggctactttaggagcaattatcttttttt

SEQ ID NO: 2620 - RNA, 164 nt, synthetic construct
  source 1..164: mol_type = other RNA
gcctaggcaacagaaggctaaagaaggtatattgctgttgacagtgagcgacgtacctgatcatcaattaactgtgaagccacagatgggttaattgatgatcaggtacgctgcctactgcctcggacttcaaggggctactttaggagcaattatcttttttt

SEQ ID NO: 2621 - RNA, 167 nt, synthetic construct
  source 1..167: mol_type = other RNA
gcctaggcaacagaaggctcgagaaggtatattgctgttgacagtgagcgtcctgtacctgatcatcaattatagtgaagccacagatgtataattgatgatcaggtacaggttgcctactgcctcggacttcaagggggctactttaggagcaattatcttttttt

SEQ ID NO: 2622 - RNA, 168 nt, synthetic construct
  source 1..168: mol_type = other RNA
gcctaggcaacagaatgctaaagaaggtatattgctgttgacagtgagcgactaattgatgatcaggtacaggtctgtgaagccacagatgggtcctgtaccatcatcaattagctgcctactgcctcggacttcaaggggctactttaggagcaattatcttttttt

SEQ ID NO: 2623 - RNA, 167 nt, synthetic construct
  source 1..167: mol_type = other RNA
gcctaggcaacagaaggctcgagaaggtatattgctgttgacagtgagcgtcctgtacctgatcatcaattatagtgaagccacagatgtataattgatgatcaggtacaggttgcctactgcctcggaattcaagggggctactttaggagcaattatcttttttt

SEQ ID NO: 2624 - RNA, 164 nt, synthetic construct
  source 1..164: mol_type = other RNA
gcctaggcaacagaaggctaaagaaggtatattgctgttgacagtgagcgacgctgatcttcgagaatctactgtgaagccacagatgggtagattctcgaagatcagcgctgcctactgcctcggacttcaaggggctactttaggagcaattatcttttttt

SEQ ID NO: 2625 - RNA, 167 nt, synthetic construct
  source 1..167: mol_type = other RNA
gcctaggcaacagaaggctcgagaaggtatattgctgttgacagtgagcgccatgctgatcttcgagaatcttagtgaagccacagatgtaagattctcgaagatcagcatggtgcctactgcctcggacttcaagggggctactttaggagcaattatcttttttt

SEQ ID NO: 2626 - RNA, 168 nt, synthetic construct
  source 1..168: mol_type = other RNA
gcctaggcaacagaatgctaaagaaggtatattgctgttgacagtgagcgacagattctcgaagatcagcatggctgtgaagccacagatgggccatgcttcttcgagaatctgctgcctactgcctcggacttcaaggggctactttaggagcaattatcttttttt

SEQ ID NO: 2627 - RNA, 167 nt, synthetic construct
  source 1..167: mol_type = other RNA
gcctaggcaacagaaggctcgagaaggtatattgctgttgacagtgagcgccatgctgatcttcgagaatcttagtgaagccacagatgtaagattctcgaagatcagcatggtgcctactgcctcggaattcaagggggctactttaggagcaattatcttttttt

SEQ ID NO: 2628 - RNA, 164 nt, synthetic construct
  source 1..164: mol_type = other RNA
gcctaggcaacagaaggctaaagaaggtatattgctgttgacagtgagcgacggaagaagggcaagaagtactgtgaagccacagatgggtacttcttgcccttcttccgctgcctactgcctcggacttcaaggggctactttaggagcaattatcttttttt

SEQ ID NO: 2629 - RNA, 167 nt, synthetic construct
  source 1..167: mol_type = other RNA
gcctaggcaacagaaggctcgagaaggtatattgctgttgacagtgagcggaccggaagaagggcaagaagttagtgaagccacagatgtaacttcttgcccttcttccggtctgcctactgcctcggacttcaagggggctactttaggagcaattatcttttttt

SEQ ID NO: 2630 - RNA, 168 nt, synthetic construct
  source 1..168: mol_type = other RNA
gcctaggcaacagaatgctaaagaaggtatattgctgttgacagtgagcgacacttcttgcccttcttccggtcctgtgaagccacagatggggaccggaaggggcaagaagtgctgcctactgcctcggacttcaaggggctactttaggagcaattatcttttttt

SEQ ID NO: 2631 - RNA, 167 nt, synthetic construct
  source 1..167: mol_type = other RNA
gcctaggcaacagaaggctcgagaaggtatattgctgttgacagtgagcggaccggaagaagggcaagaagttagtgaagccacagatgtaacttcttgcccttcttccggtctgcctactgcctcggaattcaagggggctactttaggagcaattatcttttttt

SEQ ID NO: 2632 - RNA, 164 nt, synthetic construct
  source 1..164: mol_type = other RNA
gcctaggcaacagaaggctaaagaaggtatattgctgttgacagtgagcgacggatcaacgagaagaaagactgtgaagccacagatgggtctttcttctcgttgatccgctgcctactgcctcggacttcaaggggctactttaggagcaattatcttttttt

SEQ ID NO: 2633 - RNA, 167 nt, synthetic construct
  source 1..167: mol_type = other RNA
gcctaggcaacagaaggctcgagaaggtatattgctgttgacagtgagcgaagctgatcaacgagaagaaagtagtgaagccacagatgtactttcttctcgttgatcagctttgcctactgcctcggacttcaagggggctactttaggagcaattatcttttttt

SEQ ID NO: 2634 - RNA, 168 nt, synthetic construct
  source 1..168: mol_type = other RNA
gcctaggcaacagaatgctaaagaaggtatattgctgttgacagtgagcgacctttcttctcgttgatcagcttctgtgaagccacagatgggaagctgatccgagaagaaaggctgcctactgcctcggacttcaaggggctactttaggagcaattatcttttttt

SEQ ID NO: 2635 - RNA, 167 nt, synthetic construct
  source 1..167: mol_type = other RNA
gcctaggcaacagaaggctcgagaaggtatattgctgttgacagtgagcgaagctgatcaacgagaagaaagtagtgaagccacagatgtactttcttctcgttgatcagctttgcctactgcctcggaattcaagggggctactttaggagcaattatcttttttt

SEQ ID NO: 2636 - RNA, 164 nt, synthetic construct
  source 1..164: mol_type = other RNA
gcctaggcaacagaaggctaaagaaggtatattgctgttgacagtgagcgacggaagagttccagaaagaactgtgaagccacagatgggttctttctggaactcttccgctgcctactgcctcggacttcaaggggctactttaggagcaattatcttttttt

SEQ ID NO: 2637 - RNA, 167 nt, synthetic construct
  source 1..167: mol_type = other RNA
gcctaggcaacagaaggctcgagaaggtatattgctgttgacagtgagcgactgggaagagttccagaaagatagtgaagccacagatgtatctttctggaactcttcccagttgcctactgcctcggacttcaagggggctactttaggagcaattatcttttttt

SEQ ID NO: 2638 - RNA, 168 nt, synthetic construct
  source 1..168: mol_type = other RNA
gcctaggcaacagaatgctaaagaaggtatattgctgttgacagtgagcgactctttctggaactcttcccagtctgtgaagccacagatgggactgggaagttccagaaagagctgcctactgcctcggacttcaaggggctactttaggagcaattatcttttttt

SEQ ID NO: 2639 - RNA, 167 nt, synthetic construct
  source 1..167: mol_type = other RNA
gcctaggcaacagaaggctcgagaaggtatattgctgttgacagtgagcgactgggaagagttccagaaagatagtgaagccacagatgtatctttctggaactcttcccagttgcctactgcctcggaattcaagggggctactttaggagcaattatcttttttt

SEQ ID NO: 2640 - DNA, 164 bp, synthetic construct
  source 1..164: mol_type = other DNA
gcctaggcaacagaaggctaaagaaggtatattgctgttgacagtgagcgacgctgatcatcaattacttactgtgaagccacagatgggtaagtaattgatgatcagcgctgcctactgcctcggacttcaaggggctactttaggagcaattatcttttttt

SEQ ID NO: 2641 - DNA, 167 bp, synthetic construct
  source 1..167: mol_type = other DNA
gcctaggcaacagaaggctcgagaaggtatattgctgttgacagtgagcgtgtacctgatcatcaattactttagtgaagccacagatgtaaagtaattgatgatcaggtacatgcctactgcctcggacttcaagggggctactttaggagcaattatcttttttt

SEQ ID NO: 2642 - DNA, 168 bp, synthetic construct
  source 1..168: mol_type = other DNA
gcctaggcaacagaatgctaaagaaggtatattgctgttgacagtgagcgacaagtaattgatgatcaggtacactgtgaagccacagatgggtgtacctgaatcaattacttgctgcctactgcctcggacttcaaggggctactttaggagcaattatcttttttt

SEQ ID NO: 2643 - DNA, 167 bp, synthetic construct
  source 1..167: mol_type = other DNA
gcctaggcaacagaaggctcgagaaggtatattgctgttgacagtgagcgtgtacctgatcatcaattactttagtgaagccacagatgtaaagtaattgatgatcaggtacatgcctactgcctcggaattcaagggggctactttaggagcaattatcttttttt

SEQ ID NO: 2644 - DNA, 164 bp, synthetic construct
  source 1..164: mol_type = other DNA
gcctaggcaacagaaggctaaagaaggtatattgctgttgacagtgagcgacgcaactgcgccttcatttactgtgaagccacagatgggtaaatgaaggcgcagttgcgctgcctactgcctcggacttcaaggggctactttaggagcaattatcttttttt

SEQ ID NO: 2645 - DNA, 167 bp, synthetic construct
  source 1..167: mol_type = other DNA
gcctaggcaacagaaggctcgagaaggtatattgctgttgacagtgagcgcagtacaactgcgccttcattttagtgaagccacagatgtaaaatgaaggcgcagttgtactgtgcctactgcctcggacttcaagggggctactttaggagcaattatcttttttt

SEQ ID NO: 2646 - DNA, 168 bp, synthetic construct
  source 1..168: mol_type = other DNA
gcctaggcaacagaatgctaaagaaggtatattgctgttgacagtgagcgacaaatgaaggcgcagttgtactgctgtgaagccacagatgggcagtacaaccgccttcatttgctgcctactgcctcggacttcaaggggctactttaggagcaattatcttttttt

SEQ ID NO: 2647 - DNA, 167 bp, synthetic construct
  source 1..167: mol_type = other DNA
gcctaggcaacagaaggctcgagaaggtatattgctgttgacagtgagcgcagtacaactgcgccttcattttagtgaagccacagatgtaaaatgaaggcgcagttgtactgtgcctactgcctcggaattcaagggggctactttaggagcaattatcttttttt

SEQ ID NO: 2648 - DNA, 164 bp, synthetic construct
  source 1..164: mol_type = other DNA
gcctaggcaacagaaggctaaagaaggtatattgctgttgacagtgagcgacgctgagcaagcacattaaactgtgaagccacagatgggtttaatgtgcttgctcagcgctgcctactgcctcggacttcaaggggctactttaggagcaattatcttttttt

SEQ ID NO: 2649 - DNA, 167 bp, synthetic construct
  source 1..167: mol_type = other DNA
gcctaggcaacagaaggctcgagaaggtatattgctgttgacagtgagcgaaggcctgagcaagcacattaatagtgaagccacagatgtattaatgtgcttgctcaggcctttgcctactgcctcggacttcaagggggctactttaggagcaattatcttttttt

SEQ ID NO: 2650 - DNA, 168 bp, synthetic construct
  source 1..168: mol_type = other DNA
gcctaggcaacagaatgctaaagaaggtatattgctgttgacagtgagcgacttaatgtgcttgctcaggccttctgtgaagccacagatgggaaggcctgaaagcacattaagctgcctactgcctcggacttcaaggggctactttaggagcaattatcttttttt

SEQ ID NO: 2651 - DNA, 167 bp, synthetic construct
  source 1..167: mol_type = other DNA
gcctaggcaacagaaggctcgagaaggtatattgctgttgacagtgagcgaaggcctgagcaagcacattaatagtgaagccacagatgtattaatgtgcttgctcaggcctttgcctactgcctcggaattcaagggggctactttaggagcaattatcttttttt

SEQ ID NO: 2652 - DNA, 164 bp, synthetic construct
  source 1..164: mol_type = other DNA
gcctaggcaacagaaggctaaagaaggtatattgctgttgacagtgagcgacgcctgatcatcaattactactgtgaagccacagatgggtagtaattgatgatcaggcgctgcctactgcctcggacttcaaggggctactttaggagcaattatcttttttt

SEQ ID NO: 2653 - DNA, 167 bp, synthetic construct
  source 1..167: mol_type = other DNA
gcctaggcaacagaaggctcgagaaggtatattgctgttgacagtgagcgctgtacctgatcatcaattacttagtgaagccacagatgtaagtaattgatgatcaggtacagtgcctactgcctcggacttcaagggggctactttaggagcaattatcttttttt

SEQ ID NO: 2654 - DNA, 168 bp, synthetic construct
  source 1..168: mol_type = other DNA
gcctaggcaacagaatgctaaagaaggtatattgctgttgacagtgagcgacagtaattgatgatcaggtacagctgtgaagccacagatgggctgtacctgcatcaattactgctgcctactgcctcggacttcaaggggctactttaggagcaattatcttttttt

SEQ ID NO: 2655 - DNA, 167 bp, synthetic construct
  source 1..167: mol_type = other DNA
gcctaggcaacagaaggctcgagaaggtatattgctgttgacagtgagcgctgtacctgatcatcaattacttagtgaagccacagatgtaagtaattgatgatcaggtacagtgcctactgcctcggaattcaagggggctactttaggagcaattatcttttttt

SEQ ID NO: 2656 - DNA, 164 bp, synthetic construct
  source 1..164: mol_type = other DNA
gcctaggcaacagaaggctaaagaaggtatattgctgttgacagtgagcgacggtacctgatcatcaattactgtgaagccacagatgggtaattgatgatcaggtaccgctgcctactgcctcggacttcaaggggctactttaggagcaattatcttttttt

SEQ ID NO: 2657 - DNA, 167 bp, synthetic construct
  source 1..167: mol_type = other DNA
gcctaggcaacagaaggctcgagaaggtatattgctgttgacagtgagcgaacctgtacctgatcatcaatttagtgaagccacagatgtaaattgatgatcaggtacaggtttgcctactgcctcggacttcaagggggctactttaggagcaattatcttttttt

SEQ ID NO: 2658 - DNA, 168 bp, synthetic construct
  source 1..168: mol_type = other DNA
gcctaggcaacagaatgctaaagaaggtatattgctgttgacagtgagcgacaattgatgatcaggtacaggttctgtgaagccacagatgggaacctgtacgatcatcaattgctgcctactgcctcggacttcaaggggctactttaggagcaattatcttttttt

SEQ ID NO: 2659 - DNA, 167 bp, synthetic construct
  source 1..167: mol_type = other DNA
gcctaggcaacagaaggctcgagaaggtatattgctgttgacagtgagcgaacctgtacctgatcatcaatttagtgaagccacagatgtaaattgatgatcaggtacaggtttgcctactgcctcggaattcaagggggctactttaggagcaattatcttttttt

SEQ ID NO: 2660 - DNA, 164 bp, synthetic construct
  source 1..164: mol_type = other DNA
gcctaggcaacagaaggctaaagaaggtatattgctgttgacagtgagcgacgttcatttggcagaaagaactgtgaagccacagatgggttctttctgccaaatgaacgctgcctactgcctcggacttcaaggggctactttaggagcaattatcttttttt

SEQ ID NO: 2661 - DNA, 167 bp, synthetic construct
  source 1..167: mol_type = other DNA
gcctaggcaacagaaggctcgagaaggtatattgctgttgacagtgagcggcgccttcatttggcagaaagatagtgaagccacagatgtatctttctgccaaatgaaggcgctgcctactgcctcggacttcaagggggctactttaggagcaattatcttttttt

SEQ ID NO: 2662 - DNA, 168 bp, synthetic construct
  source 1..168: mol_type = other DNA
gcctaggcaacagaatgctaaagaaggtatattgctgttgacagtgagcgactctttctgccaaatgaaggcgcctgtgaagccacagatggggcgccttcatggcagaaagagctgcctactgcctcggacttcaaggggctactttaggagcaattatcttttttt

SEQ ID NO: 2663 - DNA, 167 bp, synthetic construct
  source 1..167: mol_type = other DNA
gcctaggcaacagaaggctcgagaaggtatattgctgttgacagtgagcggcgccttcatttggcagaaagatagtgaagccacagatgtatctttctgccaaatgaaggcgctgcctactgcctcggaattcaagggggctactttaggagcaattatcttttttt

SEQ ID NO: 2664 - DNA, 164 bp, synthetic construct
  source 1..164: mol_type = other DNA
gcctaggcaacagaaggctaaagaaggtatattgctgttgacagtgagcgacgcatcaattacttcaaagactgtgaagccacagatgggtctttgaagtaattgatgcgctgcctactgcctcggacttcaaggggctactttaggagcaattatcttttttt

SEQ ID NO: 2665 - DNA, 167 bp, synthetic construct
  source 1..167: mol_type = other DNA
gcctaggcaacagaaggctcgagaaggtatattgctgttgacagtgagcgctgatcatcaattacttcaaagtagtgaagccacagatgtactttgaagtaattgatgatcagtgcctactgcctcggacttcaagggggctactttaggagcaattatcttttttt

SEQ ID NO: 2666 - DNA, 168 bp, synthetic construct
  source 1..168: mol_type = other DNA
gcctaggcaacagaatgctaaagaaggtatattgctgttgacagtgagcgacctttgaagtaattgatgatcagctgtgaagccacagatgggctgatcatcttacttcaaaggctgcctactgcctcggacttcaaggggctactttaggagcaattatcttttttt

SEQ ID NO: 2667 - DNA, 167 bp, synthetic construct
  source 1..167: mol_type = other DNA
gcctaggcaacagaaggctcgagaaggtatattgctgttgacagtgagcgctgatcatcaattacttcaaagtagtgaagccacagatgtactttgaagtaattgatgatcagtgcctactgcctcggaattcaagggggctactttaggagcaattatcttttttt

SEQ ID NO: 2668 - DNA, 164 bp, synthetic construct
  source 1..164: mol_type = other DNA
gcctaggcaacagaaggctaaagaaggtatattgctgttgacagtgagcgacgtacctgatcatcaattaactgtgaagccacagatgggttaattgatgatcaggtacgctgcctactgcctcggacttcaaggggctactttaggagcaattatcttttttt

SEQ ID NO: 2669 - DNA, 167 bp, synthetic construct
  source 1..167: mol_type = other DNA
gcctaggcaacagaaggctcgagaaggtatattgctgttgacagtgagcgtcctgtacctgatcatcaattatagtgaagccacagatgtataattgatgatcaggtacaggttgcctactgcctcggacttcaagggggctactttaggagcaattatcttttttt

SEQ ID NO: 2670 - DNA, 168 bp, synthetic construct
  source 1..168: mol_type = other DNA
gcctaggcaacagaatgctaaagaaggtatattgctgttgacagtgagcgactaattgatgatcaggtacaggtctgtgaagccacagatgggtcctgtaccatcatcaattagctgcctactgcctcggacttcaaggggctactttaggagcaattatcttttttt

SEQ ID NO: 2671 - DNA, 167 bp, synthetic construct
  source 1..167: mol_type = other DNA
gcctaggcaacagaaggctcgagaaggtatattgctgttgacagtgagcgtcctgtacctgatcatcaattatagtgaagccacagatgtataattgatgatcaggtacaggttgcctactgcctcggaattcaagggggctactttaggagcaattatcttttttt

SEQ ID NO: 2672 - DNA, 164 bp, synthetic construct
  source 1..164: mol_type = other DNA
gcctaggcaacagaaggctaaagaaggtatattgctgttgacagtgagcgacgctgatcttcgagaatctactgtgaagccacagatgggtagattctcgaagatcagcgctgcctactgcctcggacttcaaggggctactttaggagcaattatcttttttt

SEQ ID NO: 2673 - DNA, 167 bp, synthetic construct
  source 1..167: mol_type = other DNA
gcctaggcaacagaaggctcgagaaggtatattgctgttgacagtgagcgccatgctgatcttcgagaatcttagtgaagccacagatgtaagattctcgaagatcagcatggtgcctactgcctcggacttcaagggggctactttaggagcaattatcttttttt

SEQ ID NO: 2674 - DNA, 168 bp, synthetic construct
  source 1..168: mol_type = other DNA
gcctaggcaacagaatgctaaagaaggtatattgctgttgacagtgagcgacagattctcgaagatcagcatggctgtgaagccacagatgggccatgcttcttcgagaatctgctgcctactgcctcggacttcaaggggctactttaggagcaattatcttttttt

SEQ ID NO: 2675 - DNA, 167 bp, synthetic construct
  source 1..167: mol_type = other DNA
gcctaggcaacagaaggctcgagaaggtatattgctgttgacagtgagcgccatgctgatcttcgagaatcttagtgaagccacagatgtaagattctcgaagatcagcatggtgcctactgcctcggaattcaagggggctactttaggagcaattatcttttttt

SEQ ID NO: 2676 - DNA, 164 bp, synthetic construct
  source 1..164: mol_type = other DNA
gcctaggcaacagaaggctaaagaaggtatattgctgttgacagtgagcgacggaagaagggcaagaagtactgtgaagccacagatgggtacttcttgcccttcttccgctgcctactgcctcggacttcaaggggctactttaggagcaattatcttttttt

SEQ ID NO: 2677 - DNA, 167 bp, synthetic construct
  source 1..167: mol_type = other DNA
gcctaggcaacagaaggctcgagaaggtatattgctgttgacagtgagcggaccggaagaagggcaagaagttagtgaagccacagatgtaacttcttgcccttcttccggtctgcctactgcctcggacttcaagggggctactttaggagcaattatcttttttt

SEQ ID NO: 2678 - DNA, 168 bp, synthetic construct
  source 1..168: mol_type = other DNA
gcctaggcaacagaatgctaaagaaggtatattgctgttgacagtgagcgacacttcttgcccttcttccggtcctgtgaagccacagatggggaccggaaggggcaagaagtgctgcctactgcctcggacttcaaggggctactttaggagcaattatcttttttt

SEQ ID NO: 2679 - DNA, 167 bp, synthetic construct
  source 1..167: mol_type = other DNA
gcctaggcaacagaaggctcgagaaggtatattgctgttgacagtgagcggaccggaagaagggcaagaagttagtgaagccacagatgtaacttcttgcccttcttccggtctgcctactgcctcggaattcaagggggctactttaggagcaattatcttttttt

SEQ ID NO: 2680 - DNA, 164 bp, synthetic construct
  source 1..164: mol_type = other DNA
gcctaggcaacagaaggctaaagaaggtatattgctgttgacagtgagcgacggatcaacgagaagaaagactgtgaagccacagatgggtctttcttctcgttgatccgctgcctactgcctcggacttcaaggggctactttaggagcaattatcttttttt

SEQ ID NO: 2681 - DNA, 167 bp, synthetic construct
  source 1..167: mol_type = other DNA
gcctaggcaacagaaggctcgagaaggtatattgctgttgacagtgagcgaagctgatcaacgagaagaaagtagtgaagccacagatgtactttcttctcgttgatcagctttgcctactgcctcggacttcaagggggctactttaggagcaattatcttttttt

SEQ ID NO: 2682 - DNA, 168 bp, synthetic construct
  source 1..168: mol_type = other DNA
gcctaggcaacagaatgctaaagaaggtatattgctgttgacagtgagcgacctttcttctcgttgatcagcttctgtgaagccacagatgggaagctgatccgagaagaaaggctgcctactgcctcggacttcaaggggctactttaggagcaattatcttttttt

SEQ ID NO: 2683 - DNA, 167 bp, synthetic construct
  source 1..167: mol_type = other DNA
gcctaggcaacagaaggctcgagaaggtatattgctgttgacagtgagcgaagctgatcaacgagaagaaagtagtgaagccacagatgtactttcttctcgttgatcagctttgcctactgcctcggaattcaagggggctactttaggagcaattatcttttttt

SEQ ID NO: 2684 - DNA, 164 bp, synthetic construct
  source 1..164: mol_type = other DNA
gcctaggcaacagaaggctaaagaaggtatattgctgttgacagtgagcgacggaagagttccagaaagaactgtgaagccacagatgggttctttctggaactcttccgctgcctactgcctcggacttcaaggggctactttaggagcaattatcttttttt

SEQ ID NO: 2685 - DNA, 167 bp, synthetic construct
  source 1..167: mol_type = other DNA
gcctaggcaacagaaggctcgagaaggtatattgctgttgacagtgagcgactgggaagagttccagaaagatagtgaagccacagatgtatctttctggaactcttcccagttgcctactgcctcggacttcaagggggctactttaggagcaattatcttttttt

SEQ ID NO: 2686 - DNA, 168 bp, synthetic construct
  source 1..168: mol_type = other DNA
gcctaggcaacagaatgctaaagaaggtatattgctgttgacagtgagcgactctttctggaactcttcccagtctgtgaagccacagatgggactgggaagttccagaaagagctgcctactgcctcggacttcaaggggctactttaggagcaattatcttttttt

SEQ ID NO: 2687 - DNA, 167 bp, synthetic construct
  source 1..167: mol_type = other DNA
gcctaggcaacagaaggctcgagaaggtatattgctgttgacagtgagcgactgggaagagttccagaaagatagtgaagccacagatgtatctttctggaactcttcccagttgcctactgcctcggaattcaagggggctactttaggagcaattatcttttttt

SEQ ID NO: 2688 - DNA, 91 bp, synthetic construct
  source 1..91: mol_type = other DNA
atatttgcatgtcgctatgtgttctgggaaatcaccataaacgtgaaatgtctttggatttgggaatcttataagttctgtatgagaccac

SEQ ID NO: 2689 - DNA, 92 bp, synthetic construct
  source 1..92: mol_type = other DNA
atatttagcatgtcgctatgtgttctgggaaatcaccataaacgtgaaatgtctttggatttgggaatcttataagttctgtatgagaccac

SEQ ID NO: 2690 - DNA, 92 bp, synthetic construct
  source 1..92: mol_type = other DNA
atatttgcatgtctgcaaggcattctggatagtcaccataaacgtgaaatgtctttggatttgggaatcttataagttctgtatgagaccac

SEQ ID NO: 2691 - DNA, 91 bp, synthetic construct
  source 1..91: mol_type = other DNA
atatttgcatgtcgctatgtgttctgggaaattgacctaagtgtaaagtgtctttggatttgggaatcttataagttctgtatgagaccac

SEQ ID NO: 2692 - DNA, 91 bp, synthetic construct
  source 1..91: mol_type = other DNA
atatttagcattctgcaaggcattctggatagtgacctaagtgtaaagtgtctttggatttgggaatcttatatattctgtatgagaccac

SEQ ID NO: 2693 - DNA, 92 bp, synthetic construct
  source 1..92: mol_type = other DNA
atatttagcattctgcaaggcattctggatagtcaccataaacgtgaaatgtctttggatttgggaatcttataagttctgtatgagaccac

SEQ ID NO: 2694 - DNA, 91 bp, synthetic construct
  source 1..91: mol_type = other DNA
atatttgcatgtcgctatgtgttctgggaaacttgacctaagtgtaaagttgagatttccttcaggttttataagttctgtatgagaccac

SEQ ID NO: 2695 - DNA, 91 bp, synthetic construct
  source 1..91: mol_type = other DNA
atatttgcatgtcgctatgtgttctgggaaatcaccataaacgtgaaatttgagatttccttcaggttttataagttctgtatgagaccac

SEQ ID NO: 2696 - DNA, 91 bp, synthetic construct
  source 1..91: mol_type = other DNA
atatttgcatgtcgctatgtgttctgggaaacttgacctaagtgtaaagttgagatttccttcaggtttatatagttctgtatgagaccac

SEQ ID NO: 2697 - DNA, 92 bp, synthetic construct
  source 1..92: mol_type = other DNA
atatttagcatgtcgctatgtgttctgggaaacttgacctaagtgtaaagttgagatttccttcaggtttatatagttctgtatgagaccac

SEQ ID NO: 2698 - DNA, 91 bp, synthetic construct
  source 1..91: mol_type = other DNA
atatttgcatgatttcccatgattccttcattcaccataaacgtgaaatgtctttggatttgggaatcttataagttctgtatgagaccac

SEQ ID NO: 2699 - DNA, 94 bp, synthetic construct
  source 1..94: mol_type = other DNA
atatttgcatgtcgctatgtgttctgggaaatcttaccgtaacttgaaagtagtctttggatttgggaatcttataagttctgtatgagaccac

SEQ ID NO: 2700 - DNA, 92 bp, synthetic construct
  source 1..92: mol_type = other DNA
atatttgcatatttcccatgattccttcatcttaccgtaacttgaaagtagtctttggatttgggaatcttatatattctgtatgagaccac

SEQ ID NO: 2701 - DNA, 90 bp, synthetic construct
  source 1..90: mol_type = other DNA
atatttgcatatttcccatgattccttcattcaccataaacgtgaaatgtctttggatttgggaatcttataagttctgtatgagaccac

SEQ ID NO: 2702 - DNA, 94 bp, synthetic construct
  source 1..94: mol_type = other DNA
atatttgcatgtcgctatgtgttctgggaaactcttaccgtaacttgaaagtatgagatttccttcaggttttataagttctgtatgagaccac

SEQ ID NO: 2703 - DNA, 94 bp, synthetic construct
  source 1..94: mol_type = other DNA
atatttgcatgtcgctatgtgttctgggaaactcttaccgtaacttgaaagtatgagatttccttcaggtttatatagttctgtatgagaccac

SEQ ID NO: 2704 - DNA, 249 bp, synthetic construct
  source 1..249: mol_type = other DNA
gccacctcttttgcatattggcacccacaatccaccgcggctatgaggccagtataaggcggtaaaattacgataagatatgggattttacgtgatcgaagacatcaaagtaagcgtaagcacgaaagttgttctgcaacataccactgtaggaaattatgctaaatatgaaaccgaccataagttatcctaaccaaaagatgatttgattgaagggcttaaaataggtgtgacagtaacccttgagtc

SEQ ID NO: 2705 - DNA, 249 bp, synthetic construct
  source 1..249: mol_type = other DNA
tcccttacccagggtgccccgggcgctcatttgcatgtcccacccaacaggtaaacctgacagatcggtcgcggccaggtacggcctggcggtcagagcaccaaacttacgagccttgtgatgagttccgttacatgaaattctcctaaaggctccaagatggacaggaaagcgctcgattcggttaccgtaaggaaaacaaatgagaaactcccgtgccttataagacctggggacggacttatttgc

SEQ ID NO: 2706 - DNA, 249 bp, synthetic construct
  source 1..249: mol_type = other DNA
cccttacccagggtgccccgggcgctcatttgcatgtcccacccaacaggtaaacctgacaggtcatcgcggccaggtacgacctggcggtcagagcaccaaacatacgagccttgtgatgagttccgttgcatgaaattctcccaaaggctccaagatggacaggaaagggcgcggttcggtcaccgtaagtagaataggtgaaagactcccgtgccttataaggcctgtgggtgacttcttctcaac

SEQ ID NO: 2707 - DNA, 249 bp, synthetic construct
  source 1..249: mol_type = other DNA
caggctctgccccgcctccggggctatttgcatacgaccatttccagtaattcccagcagccaccgtagctatatttggtagaacaacgagcactttctcaactccagtcaataactacgttagttgcattacacattgggctaatataaatagaggttaaatctctaggtcatttaagagaagtcggcctatgtgtacagacatttgttccaggggctttaaatagctggtggtggaactcaatattc

SEQ ID NO: 2708 - DNA, 304 bp, synthetic construct
  source 1..304: mol_type = other DNA
cgccggccccctcgcacagacttgtgggagaagctcggctactcccctgccccggttaatttgcatataatatttcctagtaactatagaggcttaatgtgcgataaaagacagataatctgttctttttaatactagctacattttacatgataggcttggatttctataagagatacaaatactaaattattattttaaaaaacagcacaaaaggaaactcaccctaactgtaaagtaattgtgtgttttgagactataaatatcccttggagaaaagccttgtttgtcttcgagaagacct

SEQ ID NO: 2709 - RNA, 20 nt, synthetic construct
  source 1..20: mol_type = other RNA
ggccgagatgtctcgctccg

SEQ ID NO: 2710 - DNA, 200 bp, synthetic construct
  source 1..200: mol_type = other DNA
aatggccgccgctttcctgttctctggctgtaatccccagcctctgccttctctgctctgggagtccccagcctctagcccctgctacttccctccctcttggatagtggtaggggtccacaaggtgggggcttgtagcctaggggaggagctgggtctttgttgtctggtaggcaccaccgcttcctttgggtatttaa

SEQ ID NO: 2711 - DNA, 200 bp, synthetic construct
  source 1..200: mol_type = other DNA
tatagattgatgctaaaagttgttttccctcctgcccatgctctcccagatgaagggcttttattttgtgtatacttggtatccaagaaaatagttcaactatactagtttcagaagtgtattttcagtgtttaaccccaggtaaatgttttatatagaggatctgtgcaaaaatgtttgtaatttttttatatttcctg

SEQ ID NO: 2712 - DNA, 200 bp, synthetic construct
  source 1..200: mol_type = other DNA
atggcctctcatgctagcatgaattctgtctgctttttgggaccagagtcctagtgaattgcacacacaccatgcactccctctatgcccaatgtgatttatttattttaattaattaattaactttattattctttttgagtcagattctcactctgtcgtccaggctgaagtgcgtgtgatctcggctcactgcaacc

SEQ ID NO: 2713 - DNA, 200 bp, synthetic construct
  source 1..200: mol_type = other DNA
aggtcacattggtgttgtactcaattttaacaacagctggtgccctgctttcagatactggattgtactttgtgctggggttatctgaagtcagatctgcctaaggacttctttaattttggaattttcctcctttctctttcgttacagaagccccaccctgcctcacccacccttttttaaataaataaatagctaga

SEQ ID NO: 2714 - DNA, 200 bp, synthetic construct
  source 1..200: mol_type = other DNA
gaaataaatctttggctcacattcctcatgtctggctttttatttggggcagtaaaataaggtccctgttagcaaagtaaaatgtaatcatcgcaaagtgattgctacagattaactggaaacttgctctcaaagtcttctccccagccaatgactgcatcatggggcaattcaaacctggacagccttagcaaagatag

SEQ ID NO: 2715 - DNA, 200 bp, synthetic construct
  source 1..200: mol_type = other DNA
taaaggcagacgctgtttttctacccatgtggcccacacgcgactccgtttcagtggcggggctggcaaacgtcattccctagccccgcggccctttaaagcccggacaggtgcagctcggtgccgcctctggttggctggcgtggggtgacgtaatggcacatggcccgtcgccattggctgggcggcaagctccgccc

SEQ ID NO: 2716 - DNA, 200 bp, synthetic construct
  source 1..200: mol_type = other DNA
agaccttgtacagaatgtgttaaatttcttgtacaaaattgtttatttgccttttctttgtttgtaacttatctgtaaaaggtttctccctactgtcaaaaaaatatgcatgtatagtaattaggacttcattcctccatgttttcttcccttatcttactgtcattgtcctaaaaccttattttagaaaattgatcaag

SEQ ID NO: 2717 - DNA, 200 bp, synthetic construct
  source 1..200: mol_type = other DNA
aagttgagaaatgtaccggcttccatcctgtcaccatgacttcctcacatggtctgcttagcccttctctgctccttattcccagtgttccatttgaaccagtgatccatgtcctgaaaaatgctcaatctcagctaacattccatgtttcagaagcattcaggcactgccaggcttgcagtctcccagatgttgcatcc

SEQ ID NO: 2718 - DNA, 200 bp, synthetic construct
  source 1..200: mol_type = other DNA
agtgatcttggcaccaagctctactttgaggtttagtacgttctcatgtttagaaaactgtattttgtctattccttggaggggtctggccacaaaacatgattgattgcttgaggtgactgtcctgcttgcttatctgggatagtcccagcataattaccagttctctctcaaaagtgtcctggtctgagcaataaatt

SEQ ID NO: 2719 - DNA, 200 bp, synthetic construct
  source 1..200: mol_type = other DNA
ggtttctttacccaccctgaggctgtattgatcacagacctggccaggggctctgcatcctccatcaggtctctacttctgttggggaaggtgatcctaaatcgcagaaggcaccaggctgcggttttcctccctgctggcccatctggactcatggcagtggtaaagaactggattactgcaatagccagggcttgggc

SEQ ID NO: 2720 - DNA, 200 bp, synthetic construct
  source 1..200: mol_type = other DNA
catgctgatttttggagtagaattgagttctgctgaaggatactggatcagtgctttcgggggctctgttgggagagctctggctgccgttgcatctaagtatggaggggctgacttcccaatgcaccctcttttcttggagaagtcttgatcaagatcgtaatagcagctcctgtttatggagtgcctaccacgtacaa

SEQ ID NO: 2721 - DNA, 200 bp, synthetic construct
  source 1..200: mol_type = other DNA
taaacttcactgtgtgttttctatctcggatcccagtctctgaagacaacttgctttgattcaacctagaatgtgttgtttgtctttatgtgggctggaaacgccacccctcctttcattcctgggtcactgttctgaggtctcaggcgtgtgcatatggcctctggaaggtccactctgggctgctgtggcctgggagc

SEQ ID NO: 2722 - DNA, 200 bp, synthetic construct
  source 1..200: mol_type = other DNA
cctttctgcacactccagacaaacttcccagacaagctcctttgtgcctctacgtggagagggtgtggaaagttatcacattaaaagatggaggatttgctctgttttttttctttctgtccatttgctgcgtgtacccactctagtaggcattggctaaatgttgtattttggcgattcatcaacctttgcagaatatg

SEQ ID NO: 2723 - DNA, 200 bp, synthetic construct
  source 1..200: mol_type = other DNA
aacactttcctgctcctctctgtctctagcacacaactgtgaatgtcctgtggaattatgccttcagttcttttccaaatcattcctagccaaagctctgactcgttacctatgtgttttttaataaatctgaaataggctactggtaacttcttgcgttggcctccgatcaatactcgactgataccatttgttaggtt

SEQ ID NO: 2724 - DNA, 200 bp, synthetic construct
  source 1..200: mol_type = other DNA
gcttggccctttagtggctctgcctttttccttgtagaggcgatgggagccaggggtcagtgtgactgtcacactacagaccttaaggctcctacacatcttctcctgtccccatacacgcccccacctcccacctgtaggcggtgtgaacgctgtttgtggcagaaacattttaattgtaaacagcaaggctctctgcc

SEQ ID NO: 2725 - DNA, 200 bp, synthetic construct
  source 1..200: mol_type = other DNA
aagcaactcctgcctcccttcctcaccctgtctctggatttcttttctatcacctagatgcttcatccagccagaagatagccttcacgttccccatctgtcttcagagaaaaagagctgggacaccaagaacaagctgttagatcactgcctgggaggcttggcttagtactctcatctctggttccattccagttcag

SEQ ID NO: 2726 - DNA, 200 bp, synthetic construct
  source 1..200: mol_type = other DNA
aattcccggtcaaacctcttcgcgcgtgctcctctgcagcattcttcccgctgatactgactacagcagctagggagcctaagtgtgcagctccacatgttggaatttggcctccccacctcggagtcccaggcgtctgggccttcatctctttcctctcacatgatccagaggcctggatccttgctcgctaaaagact

SEQ ID NO: 2727 - DNA, 200 bp, synthetic construct
  source 1..200: mol_type = other DNA
gacgctgttcctaccagtggaaagtgcctctgtgggcgagcgggacgtggggggccctgctcgcccctcgccagggggactgactgtgtgccctgggcctgaagccccccttctggaagacctccctgttggttcctcctctacgcccacccgcctgcccccgcacaagttgccccattccagcctcgctattctccaca

SEQ ID NO: 2728 - DNA, 200 bp, synthetic construct
  source 1..200: mol_type = other DNA
aaaaataaagctggttcccagagctggtgtccatccctcatctcagctgcaaggttgctggtctgggactggagctccttacctgcgctggcccagagtgagtttcccgtggtcacgtgggcactgcaggctcgggcccctgggctcctcctcatgctccatttcttggcagggagatgccagggagagagggtctccca

SEQ ID NO: 2729 - DNA, 200 bp, synthetic construct
  source 1..200: mol_type = other DNA
gaataaataagttttccttttgttttccactcagttaccagtctgtcttttccagggagttgcagtggggtacagtaggggaaaaaagcatggactttgggttaaggccctgttctgtcactttttagccacttgtgaatttggtcacgttatttaatcctagaaactatggtttcaaatgatttgggaagcaaggctga

SEQ ID NO: 2730 - DNA, 200 bp, synthetic construct
  source 1..200: mol_type = other DNA
cttcattaataaatacctcaaatggccagtaactcaatattacttttcttccttttttaaaatgtatgtataagatttctctattggttttctgtgctgcaataataagttaccagaaacctagcggcctaatgtgccacacatttattatttatcccacagttttgtggatcaggagtgtaggcacagcttagttgggt

SEQ ID NO: 2731 - DNA, 200 bp, synthetic construct
  source 1..200: mol_type = other DNA
taaataataaattttaaaaaacttatttgcattcttcatctgatattttctgagtctgcctttgaaagtgggaatgaggtaaagggctgaggaaaaaagcattgtgaattgcatcttgcctggcatgggggtggttgtaggccctggatcacctcttcccctggcctcctcttgctgtcctaactgactttaaggacctg

SEQ ID NO: 2732 - DNA, 200 bp, synthetic construct
  source 1..200: mol_type = other DNA
taaagcaaatatattttacttctctgatgattttgtatttttctgctctcagccaaaccctggggctgccccggtgaaaaccacctctaccggggctgagaggccatcccgcctgtcagcaagtgctacgttcacttgctcttctaggcacggcctctggcctcatcccgatggctctctgcccatttcccgcacagcag

SEQ ID NO: 2733 - DNA, 200 bp, synthetic construct
  source 1..200: mol_type = other DNA
accaccagaataaacttgccgagtttacctcactagggccggacccgtggctccttagacgacagactacctcacggaggttttgtgctggtccccgactcctctggttgtttcgttttggctttttctccctccccatgtctgttctgggttttcacgtgcttcagagaagaggggctgccccaccgccactcacgtca

SEQ ID NO: 2734 - DNA, 200 bp, synthetic construct
  source 1..200: mol_type = other DNA
ttgctgctattaaaaagccgtgtgccttctaccaattgtggcctcttctttactgcctggtgcttccaagaaagggcactgttcttggtctttctggttaaactaccaaccatgatctattgcaagtggttcttgggcactaggttcagaggcagtggaggctggaagggcccatgaacaagatattggcatgggggttg

SEQ ID NO: 2735 - DNA, 200 bp, synthetic construct
  source 1..200: mol_type = other DNA
aatataataataaattttgtataaataggagttcaggggctggtttgttttttttttcccccccaaactcaaattctggatttaggtctaacaggaggctggactggagcggttcacagcaagatgctgggctcggctgtgaaggggggagtatgaggcccccttcctattcagggctttggggtagatagcccctggac

SEQ ID NO: 2736 - DNA, 200 bp, synthetic construct
  source 1..200: mol_type = other DNA
ttcaggtgtttaataaagatgtgttgactcagccctactgtctcctccctggcttcctgcctctgccccttgcccaccagagggagctcaggagcaggcctctgctctgggttggcccccgcaccgtacccccagcccccaccacaccacaccccatggcggggtttccgcctcctttttcccctgcttcgacttcctcc

SEQ ID NO: 2737 - DNA, 200 bp, synthetic construct
  source 1..200: mol_type = other DNA
ccctgaatgttcaataaagttgattctttgtagctctgtgagttgtgatatgttgtgggtgtcatctaccagtatccagcttagatgtacagaatgttaagacatttgggcaccttctgttttcagaccttgggaatagtgaggctttccttcctcccacattaatttttaccagttatctgttgaatactgtcagtgcc

SEQ ID NO: 2738 - DNA, 200 bp, synthetic construct
  source 1..200: mol_type = other DNA
ggctcagctaataaaggcgcacatgactccagtcctttgcgcagcttgttcttcctggcgtcccgagctctgggaggggcctgggcctgcttcaggttcgtggtgtgaggaggttcaggttggacgttcgggggtgtgtggtagtgttgtgtggatggtctcttggtgtcgaagactgacagctgtgcgggccctgcccc

SEQ ID NO: 2739 - DNA, 200 bp, synthetic construct
  source 1..200: mol_type = other DNA
ataaaataaattataataaactgttaactcttttcagtatttaatacctgtagttcagttagtaactttttcatatatagcatgttgcctgtatgcagttgaactatataaagttcattgcaaagcagattatcttgtttttttgcatagcaatcaaagttgaaatttgtttgctacatcaacaaattaaggacattttc

SEQ ID NO: 2740 - DNA, 200 bp, synthetic construct
  source 1..200: mol_type = other DNA
cgcatgcccaataaactgaccccacactcaccccggccaccgtctacttgttcccacctctgatcacacacatgctcacgttcgggggttggttttcacatttttattgggagccgtgggaggggccgcctctgtcagtggaggtgctcacagtttcttcagccactccaggctggggccctgagggtcctgggggtggc

SEQ ID NO: 2741 - DNA, 200 bp, synthetic construct
  source 1..200: mol_type = other DNA
atcttgcaaataaatcgaacgctgagtgctaatgtgagtcctgggcctttctgcctcctgatgtacacccatcgccatcatagcaagagtgcttctggaccttgtacttattcttaaagactaccagtatggagttcataggacaatgtggtacacctggtattacagcctttgcctttcgagtctatccactggattaa

SEQ ID NO: 2742 - DNA, 200 bp, synthetic construct
  source 1..200: mol_type = other DNA
accaaacgatataaatacaagataaattatcactggagttttttctttcccttttttctgtgcctgcataatgctgacacctgcttgtttccatacaaattgatatcaaaataaaatttgtatagattatcacatggctttttgtcttgctttcctccaagacattcctgattgtgatgagcagaacaggcagtttgccc

SEQ ID NO: 2743 - DNA, 200 bp, synthetic construct
  source 1..200: mol_type = other DNA
aataaatttgtgactaaacaaagactttcatattaaatgggttcaattgaactcatttcttattttccaagtgtcaatgtgaaaagaaaataaatgctagcactactgactagtcagtatatctccactttaaatgctaaatactttcttgaaataaaatcgcacctcccggccaggcatgatggataatgcctgtaatt

SEQ ID NO: 2744 - DNA, 200 bp, synthetic construct
  source 1..200: mol_type = other DNA
attaaggagagccaataaatgagtataggagagaaacttgaagtttcttgaagctcgaatgtctgttggtggccttccagggctgggtggagatttcattcagcataacctctgctccagagtgtggtacagcatgggcttatctctcaaaacacatccccacttctatgtttgggggactagctcccctcttctcttgc

SEQ ID NO: 2745 - DNA, 200 bp, synthetic construct
  source 1..200: mol_type = other DNA
gcctgtgacctcaattaaagcaattcctttgacctgtccagttgactttagtccttgtttctaactgccaagtcatgtgctgagtagaggctcagtggttggggcccaatggttcatctaggacgggactagagaggtcagtctacaagcaatccattgaccacttacttggtgctgcacacaaatgttggtgctatggg

SEQ ID NO: 2746 - DNA, 200 bp, synthetic construct
  source 1..200: mol_type = other DNA
acaaattacaaatgaactttcttgcacttgcttgtcgccaaataaaagagaggcccattgattcctcccccaccccaacacttttcttttaaagcttttctccctccttgttcttgtttttctttcttcctttccttttctctgagagttttaatactttcaaggactttaaaaaaataatcatgtttgaattgttttct

SEQ ID NO: 2747 - DNA, 200 bp, synthetic construct
  source 1..200: mol_type = other DNA
tggcaatcataaaaagtaataaaggttctttttgacctgttgacaaatgtatttaagcctttggatttaaagcctgttgaggctggagttaggaggcagattgatagtaggattataataaacattaaataatcagttcctttttttttttttttttttttgagatggagtctcgttctgttgctcaggccggactgcag

SEQ ID NO: 2748 - DNA, 200 bp, synthetic construct
  source 1..200: mol_type = other DNA
ccctggatcctactctcttattaaaaagatttttgctgacagtgctctgtgtgtgttattgggggatgggttggagaattggttcctgcgggtgagaatgcatttggtttggggacagggacgtcatgccagtgaagaccagccctcttcctgcccccactgccccggaagctccctgcctccttcccaacagccaggtg

SEQ ID NO: 2749 - DNA, 200 bp, synthetic construct
  source 1..200: mol_type = other DNA
catgggccctgcatgctaataaatgcttcttcagaaatggctgctgtcttttttttttcccccatgagaagcagggggaggggcaggcaagggtagagccaagagcctcagtttccccattcatgaagcatgatggtttggagtgtcagccattttatcctgtaagcctctcctataatgatgcccatttattgagcacc

SEQ ID NO: 2750 - DNA, 200 bp, synthetic construct
  source 1..200: mol_type = other DNA
cctccgccccaccatgaataaacactttcttatacagactccttccctgtccatctacctgcctacctactttccgtccatccctccctcccttcatccctccacccctgctctgtgccgggcactgtagctttaccagcgaacaggacacagcatggtccctgcccacgtggagccctcttcccatgaggaaggcaagc

SEQ ID NO: 2751 - DNA, 200 bp, synthetic construct
  source 1..200: mol_type = other DNA
gacttatccattttttaatgtattaaatacacccagccagttatgcagctactttttctttactgtatctcatgttttcttttttcaatgctaattatagctctctacatcacggtaatcatgcctatgcctacataagaatggctgagctaacaatacacattctggaaacataacactctacattacaaagtttgtta

SEQ ID NO: 2752 - DNA, 200 bp, synthetic construct
  source 1..200: mol_type = other DNA
gccactgcagtctgggccccatcattaaacgggctgcgtttaatctgtgtgtgtgtgtgatctgtaccagcggcccagggaggccaggcagccctcttctctgcgcaggtgtacataaaagggtttttagggggaagatgagatggcaacactgctttattaggccgggccagccaggagcagacacacggctcctcagt

SEQ ID NO: 2753 - DNA, 200 bp, synthetic construct
  source 1..200: mol_type = other DNA
agacatggcccctgaagggcaataaagctgctagtttattaatacagtctcccgtttcctttcatttccatctggtcataatcccccttcccctcccccagaacttcctgcagctgctcccgtctgaccccgaacatgggtctctccctgttgctctccaccccaccagcttctccttcctacagttcgcacagctcgag

SEQ ID NO: 2754 - DNA, 200 bp, synthetic construct
  source 1..200: mol_type = other DNA
gcgcgctgcccgtccccatcttaataaagaccatgccctgcgctccggactgcgcctagttcctgcgcgacctgcgtgtgcgttgggttgggggcgcggggcttgaaatggggggtagaaaagagtcaggactctgtgtcggccactctggcatctctctcctcagtccccactctattttctttcctcaattccgtttc

SEQ ID NO: 2755 - DNA, 200 bp, synthetic construct
  source 1..200: mol_type = other DNA
cttcttttttttttctttttattaaaactgtgatagattttgttaccaagcagcatttgataagaggtccactggttttggtaaacaataaacatttttataacaattgttgtacagtcggctggtgctctgagaacaatagaacacatattggctcaaaccagagtttggggaggttgggttgagataatgacctaaac

SEQ ID NO: 2756 - DNA, 200 bp, synthetic construct
  source 1..200: mol_type = other DNA
tctcttcccacctgtcaacctgaattaaagtctacactgcctttgtgaagcgggtggtttcttattttgtctggggagaagaaggagaatggagagagagtcatttttatgtcagactttcttgccagtgtctgcttctatagctggcttgggaagaaggtgaatgatgaataaataccctcagggtacacagatgttct

SEQ ID NO: 2757 - DNA, 200 bp, synthetic construct
  source 1..200: mol_type = other DNA
ccagacacactgattggaactgtattatattaaaatactaaaaatcctaagtgtctttcgtctttgcggatgggaaagggaaaaatgctacctcgtagtggcttctgatgggaacaggacgcgggttctgttgctgccttcctgtgtctttttttttttttttttttctttctttgagtcggagtcttgctctgtggctc

SEQ ID NO: 2758 - DNA, 200 bp, synthetic construct
  source 1..200: mol_type = other DNA
tactatctttctaatgaatttgtgattaaatatataatagttgttgaaaatgagtaactttgcgttctccccctaggttgttcttagatgcctggcttatgtgttgacaaagtaaagttttctgttctgagcaaagttatgattataaaaagcaagaaagaacaatcaagagtccttatgtagctatttgaacagaaagc

SEQ ID NO: 2759 - DNA, 200 bp, synthetic construct
  source 1..200: mol_type = other DNA
tccttgttttgtcttcacccatgtaataaaggtgtttattgttttgttcccacatttatgttgcctgaatatatgactgttttctctgctttatttccttgccctgcaaaactgatctgggtgggtggctgcaaccccttgccttaacctctgcctcctactgtcctgagccaggctcaccacactgtaaagtccctgtt

SEQ ID NO: 2760 - DNA, 200 bp, synthetic construct
  source 1..200: mol_type = other DNA
acccttttcccattcattcacaaataaattacaatgggtgctgagaacttaactttccttaagtctggttccttgttggatctcaggatttcagatctgttcattctcattccaactactccttgcctgcaaggtacacagctctccacactccttttttttttttttttttttttgaggcagagtctcgctctatcgcc

SEQ ID NO: 2761 - DNA, 200 bp, synthetic construct
  source 1..200: mol_type = other DNA
ctgcatgtgtgacactgattctttggaaataaagagtggaagctgcaggtgacacgtgaagggttatttatggttatgatgaccctgtcctgcaacgagggactggcagccactactgaggaggagggtcccatctctctcctgtcggctttcaccgaggtcacagccagacgtggggcaaaggtgttccctgtcctacc

SEQ ID NO: 2762 - DNA, 200 bp, synthetic construct
  source 1..200: mol_type = other DNA
cacccagccacccatgtccagaataaaaccctcctctgcccacacacccctcactgtacgttatcacctaacagcacttcagagccatgtgaaggctggcagagcctggtctggtgctggctcctggggatgattagggaccctcgcccacacatgaacggcctatctctgtgtagcctgattcaaaccctgaagagaac

SEQ ID NO: 2763 - DNA, 200 bp, synthetic construct
  source 1..200: mol_type = other DNA
gccctgtccatacccatgtaaggtgttcaataaagaacatgaaccaactcttgtgaatttgtttttattggggaacacggcacagggtgggaaatgtcaccttgggctatggtatgccccacctcccagagaatgtccatttgcattctaatcttcctgggatgctttatggaactttttcttcttcttggagctgctct

SEQ ID NO: 2764 - DNA, 200 bp, synthetic construct
  source 1..200: mol_type = other DNA
taaagaaattattggataacctctacaaataaagataggggaactctgaaagagaaagtccttttgatttccatttgactgctttctatgagcccacgcctcatcttcccctgtgcacatgtttacctgatacagcagtgctgcgtgttgtacatacttggaacaacaaactagaaatactgtacttctgtaccaacatt

SEQ ID NO: 2765 - DNA, 200 bp, synthetic construct
  source 1..200: mol_type = other DNA
cgtctgcttcggagcttgctgcttaataaatgttggtggaatgaatgaatgaattgatgctgtggtttgattatttctgttctttttttttttgagtcggagtctcgctcttgttgcccaggctggagtgcagtggcatgatctcagctcactgcaacctctgccacctgggttcaagctgttctcctgcctcagcctcc

SEQ ID NO: 2766 - DNA, 200 bp, synthetic construct
  source 1..200: mol_type = other DNA
gttctcattctttcaattgttatgcaccagagattaaaaagctttaactataaaaacagaagctatttacatatttgttttcactcaactttccaagggaaatgttttattttgtaaaatgcattcatttgtttactgtagtttttgtgggttttattttacttgctttttatgttttaggaaaagcgttcactttgaac

SEQ ID NO: 2767 - DNA, 200 bp, synthetic construct
  source 1..200: mol_type = other DNA
ccccagctttctacagacaccagatttgtgaataaagttggggaatggacagcctaactgggacattgcagtggctgcttgctggggccgggatttgcaggggaacccaggatggcactggcccatagggagctccaggtgtggctggctggacacatggtcaaagtcacaaggccgggagagtggtgtcctttattgca

SEQ ID NO: 2768 - DNA, 200 bp, synthetic construct
  source 1..200: mol_type = other DNA
tgctaccttaaagtcagaataacctgcattatagctggaataaactttaaattactgttccttttttgattttcttatccggctgctcccctatcagacctcatcttttttaattttattttttgtttacctccctccattcattcacatgctcatctgagaagacttaagttcttccagctttggacaataactgcttt

SEQ ID NO: 2769 - DNA, 200 bp, synthetic construct
  source 1..200: mol_type = other DNA
tttctgttcctgtttttttttttttatttaattttgcaaataaaaatttattttgaatcctttttcctcatatgcatttactccctcctctagtattgtggctatctggtactgggggatttttggtgtgtgtgtgtgtttgtgtgtgtgtttgtttgttttttctttttttgcacagaaaaatctctcttgatgactaa

SEQ ID NO: 2770 - DNA, 200 bp, synthetic construct
  source 1..200: mol_type = other DNA
aaaatatataaatgccacggtcctgctctggtcaataaaggatcctttgttgatacgtaagtggtggtcttccttaaggggcttcaaattagtggatatgcttagctcagaccttccagccagtctcttgagtctaaagggttcagctttccatccctggctcaggcactgccaacaccttgtcttcacccaaacaaatc

SEQ ID NO: 2771 - DNA, 200 bp, synthetic construct
  source 1..200: mol_type = other DNA
ttattgctgtcttttttttaaaaaaaaaagtttaaataaaatgtctcagagcatctctagcagcctcgactggcttttgtgctccacggtgtggaatcgccagctgctgtctgtgttggaggtcggctgtgtcctccccaggcagctcacgctgggggtacagcctgggcctgagcctcactcagccacggagggtccca

SEQ ID NO: 2772 - DNA, 200 bp, synthetic construct
  source 1..200: mol_type = other DNA
gtgtgtgtacgtgcgcgcgtgcgtgaggccctgccacgattaaagactgagtccggccctctggctccgtcctggtcatttcctgctcgtacctggcctgtctccctccctgtctcagccccatctctgccctgctgttcccacacagtcatcctggctgctgccaccctctgtggccatgtcaccttgcccccagcaga

SEQ ID NO: 2773 - DNA, 200 bp, synthetic construct
  source 1..200: mol_type = other DNA
tgctgtctgctaatagtagggctagttccaattctcattaaaccacattgtaaacagtagttacagtagtacagagctctcatttcaggctggcggggcctctagccagcctgctgcaacctcttggctggcattccaagcctgctcagggggctgattttggggcgagtttcttctcttatgctggtgtggtgtttgcc

SEQ ID NO: 2774 - DNA, 200 bp, synthetic construct
  source 1..200: mol_type = other DNA
atttctgaactgccaatcaaatgtctcattttggtaagcttttacaaatttgttaaaacaacggtgttgtattacgatgttttctaggctagtaatgccagagtgagtcagtcacttgtcagatgtgatgtggataattaagcacagaggcagccttcctcatgtgccagggcacttagggtagggcttgggggacggga

SEQ ID NO: 2775 - DNA, 200 bp, synthetic construct
  source 1..200: mol_type = other DNA
tctaggaatcagcttgcaacagagcacaaaaaacaccaaaaaaatttcaaacaagaaaaaaaaaaaaaaaaggaaaagaaaaaaattgaactgtaagctttaatgattactttagatttgttttattttccctcctgcagtgaattaattggatatatatcagctgacactgatagattgatatttctgatcgttatttt

SEQ ID NO: 2776 - DNA, 200 bp, synthetic construct
  source 1..200: mol_type = other DNA
gtgtctaccatgattatttttctaagctggttggttaataaacagtacctgctctcaaattgaaatatattgttgtatttgtgatttgttgttgttgttgttagcctgcctctgtcttcccttaactactgtggcaagtgtggtgtgtgataaaattaagccaaatcaacagcccatttcgtgcaaaatcagggtcgagt

SEQ ID NO: 2777 - DNA, 200 bp, synthetic construct
  source 1..200: mol_type = other DNA
gatgcagatgtttcttcctgaaaacttctttttttacaaagaaaattagatgtacatgtataattcagtgtgctttgtctttctccagattaatatcggttacactgctgatgtttgtaaattaaacagatatttacttcattaacagcttggtggtgttcttagaaattgcacaataggccactccttaagaatttttt

SEQ ID NO: 2778 - DNA, 200 bp, synthetic construct
  source 1..200: mol_type = other DNA
cttttgaatgagtagaaaaaaaaattgttttgaattattgctttattaaaaaataaacattggtattttttgagtgctttttttcttccaaattgtggaattttatatctgaaattaaaatatagagcttaacctctttataatattatttaaaacaaacaaaaaaagaaagtgattcatccaaagtaaaagctagaact

SEQ ID NO: 2779 - DNA, 200 bp, synthetic construct
  source 1..200: mol_type = other DNA
aagaatttcatctctgttccctaactgtgcttgtattttttaaaaaataaagccccaattcagaattgctggattattagtacttgaacactagtttaatcctaaatacatatattaaaagaacatcaataaaatgaaaaagctaacaaatgtttgtgtgtttctgaaatggcacattgatcgttattttcctttctttt

SEQ ID NO: 2780 - DNA, 200 bp, synthetic construct
  source 1..200: mol_type = other DNA
gtctggcgccgcccttcccgcccgttgctgctgtgatccgtagtaataaattctcagaggactcagcctttcctgcgggtctggagctccatttgccgggtgtgaggtctctcaggattgaggctgctgccagtcccaggtgttgcagaagacccgggcagcagggtggcagattggccgtccctctctctagctggctc

SEQ ID NO: 2781 - DNA, 200 bp, synthetic construct
  source 1..200: mol_type = other DNA
agcctgagtgtgtgtacgtgcgcgcgtgcgtgaggccctgccacgattaaagactgagtccggccctctggctccgtcctggtcatttcctgctcgtacctggcctgtctccctccctgtctcagccccatctctgccctgctgttcccacacagtcatcctggctgctgccaccctctgtggccatgtcaccttgcccc

SEQ ID NO: 2782 - DNA, 200 bp, synthetic construct
  source 1..200: mol_type = other DNA
aatatgtcctcttttgttgtttcttaatttggaaactaataaaatattttctgtgtgttcctggcactgatttgcttgtgtctttctttactttgccctacttctatcttattttatttacacacacgaggcaaatggcaaccaagatgtgtaatacatagataacaaaggaagttctcacaacagaatgacgtcttcat

SEQ ID NO: 2783 - DNA, 200 bp, synthetic construct
  source 1..200: mol_type = other DNA
gtaatggagagtgatggaaacaaagtgtacttaatgcacagcttattaaaaaaatcaaaattgttatcttaatagatatattttttcaaaaactataagggcagttttgtgctattgatattttttcttcttttgcttaaacagaagccctggccatccatgtattttgcaattgactagatcaagaactgtttatagct

SEQ ID NO: 2784 - DNA, 200 bp, synthetic construct
  source 1..200: mol_type = other DNA
aagagtaccatttggggtctcagttcactctttccttgtttattaaatatcaacttttcctgcctaatgggctgaggttcattttcccattcctcaaggtaagggtagactacctaggaacttattgcatctttaggccagctggcttagtgctacccatctgaacccccagattactacccaagtcttccttttgcccc

SEQ ID NO: 2785 - DNA, 200 bp, synthetic construct
  source 1..200: mol_type = other DNA
gcactgtttcagatggaaaaatataaactatttttttctgagcgatacattaaactattttccccagattgaattgcactcatgatgtaatgggaacttcaagtgggtaatcacactttttccttcacttaacgaaggatactatgcactgttcacttttgacttgtgttgtaccttgcagtttatagcagatcattttg

SEQ ID NO: 2786 - DNA, 200 bp, synthetic construct
  source 1..200: mol_type = other DNA
cttgcaagcatcccatggggcgggggcgggaccagggagaattaataaagttctggacttttgctatatggtgctttgtggtctctgggggacactgtctggtttcataagccctggccttggctgggaccctcctgaggcccgcaccgcccctcatcctcagcaaaagcccccggactcccacctgtgctgcctggttc

SEQ ID NO: 2787 - DNA, 200 bp, synthetic construct
  source 1..200: mol_type = other DNA
ccattctggccaccagagcccacttggccccacccctcaataaaccgtgtggctttggactctcgtatttcagcctgacagtctgttcccgtgtcctggagttggggaagtgctgccttcccacccacgccttcaggagagagtagtgccctgcccggtcctatgtgggcctcagctcagctggcagcttcccctcctgt

SEQ ID NO: 2788 - DNA, 200 bp, synthetic construct
  source 1..200: mol_type = other DNA
gtttccccttttaaggtttcaacaaatttcattgcactttcctttcaataaagttgttgcattcccaattggtgttttttttttttttttttttaagtttattttgcattagactgggtgaagggggtcaaggttttcggtctacaaatgttcctgtggtaacggtgaaatgtcagtgaagggggtggccttaatatagt

SEQ ID NO: 2789 - DNA, 200 bp, synthetic construct
  source 1..200: mol_type = other DNA
cccaaaggggcttcactgaagagcccacttccaagtcaataaaaagcaactcctgcctcccttcctcaccctgtctctggatttcttttctatcacctagatgcttcatccagccagaagatagccttcacgttccccatctgtcttcagagaaaaagagctgggacaccaagaacaagctgttagatcactgcctggga

SEQ ID NO: 2790 - DNA, 200 bp, synthetic construct
  source 1..200: mol_type = other DNA
ctgctcggctccccccgcccaccccgccgcctctaatttatagcttggtaataaatttcttttctgcatttctcgtttgcatgtgtccagattccagaaggcaggttgctcctcctgccggttgcagggctgtgggtgctggagatggggaggcagcagcctttaacagcccagaagggccgggctgggtaaggttggcg

SEQ ID NO: 2791 - DNA, 200 bp, synthetic construct
  source 1..200: mol_type = other DNA
cagcctaaccccattcctgtgcggacagcccttcctcccatttcccattaaagagccagtttattttctaacttcgtttagtttgagtatggaaaacgggtattggggattctatgtactaacggtcgagaagtgaatgtgaaagaaccaccttcttgaggccatctcagcctttatctttgcatcttgctggtgttccc

SEQ ID NO: 2792 - DNA, 200 bp, synthetic construct
  source 1..200: mol_type = other DNA
tccacctgtccctcctgggctgctggattgtctcgttttcctgccaaataaacaggatcagcgctttacaattggtgtgtgggggtctctcatccttgactctttcccctgctctaaacatgcagccttccctgggaggctcactcacttgggagtgcctaccagctagtggtccctggcctctcagtactattctacag

SEQ ID NO: 2793 - DNA, 200 bp, synthetic construct
  source 1..200: mol_type = other DNA
ccagcaggacccgcccgttcccgaccttccctcgagtcccgccaagaaataaaggcgatgatttccgaccatgctcgcgttctccgcggagtctgtgctacaccgtggagcggggcggggcgtgctgggatctcgaggcggggcctctgccggacccctcccaccagtcgagccccgggcgccgtacagaggctgggtaa

SEQ ID NO: 2794 - DNA, 200 bp, synthetic construct
  source 1..200: mol_type = other DNA
cccgagctcggggcgggcggagcccgcgtggccgaagctggaaaccaaacctaataaagttttcccatcccacctccgggtttctctgttactgtgccgcgcgggcggggcggggtgggcagaggggcggggtgcgcatgcgcgcgggccgggccgtcgggcaccgcggtgggaccacaactcccattaggccacggagc

SEQ ID NO: 2795 - DNA, 200 bp, synthetic construct
  source 1..200: mol_type = other DNA
ccctgcttctgctggggctgtgtacagagtgcaaatgtttatttaaaataaagttctatttatcccttgtgaccactgctgtccactaggggctcctctctcagggcctccatacactgggccacggttccccaaagaggaaggaggaaggtaggtagagaagagagtgagatgcttattgctggggaacgggctggctg

SEQ ID NO: 2796 - DNA, 200 bp, synthetic construct
  source 1..200: mol_type = other DNA
gaggccctgccccctacccttgccctttaacttattgggactgaataaagaatggagaggccctctcaggctaccaagctgttgtcgctgctatcactacaccaccaccttcatcacttttattttttgaaaagaaagggaagagtcatggggtgttgccagctccttctttctgcgccatcctattgtttcctctcaga

SEQ ID NO: 2797 - DNA, 200 bp, synthetic construct
  source 1..200: mol_type = other DNA
gaggttggggctgagtgctggccctctgcgtcttccttattaaccttgaatcctcattaaaggtttctttacccaccctgaggctgtattgatcacagacctggccaggggctctgcatcctccatcaggtctctacttctgttggggaaggtgatcctaaatcgcagaaggcaccaggctgcggttttcctccctgctg

SEQ ID NO: 2798 - DNA, 200 bp, synthetic construct
  source 1..200: mol_type = other DNA
accccaaagatccctggagggctagttcgtatttttgtgttaaactatttgttagaataaagtaattttgctaataaatgggactcttcttggaggcctaaaatggggttaaaagctctctagggggttatccacttagcctcaggttggaagctgcctggaagtcgggtttgggggcctttttggaacttggtagagtc

SEQ ID NO: 2799 - DNA, 200 bp, synthetic construct
  source 1..200: mol_type = other DNA
cactcttatcctccttatttaagtccttcccaggctatgccccaccctctttgtattaaaagcctcctcttttgggccttgtttcttgtagcttcttggtgggggtgggggtgcatgagggactgggtgggaggcggcctggggagggacaggactccagcagtctcctagctctgcccctctgctagcctgagggctgt

SEQ ID NO: 2800 - DNA, 200 bp, synthetic construct
  source 1..200: mol_type = other DNA
agccaggcctgtcttgatgatttttggttttttttcattgtcctgttgaaatcaagtaattaaacatttaagagccacaaaattgtatcacttttataatattttgcagtaaaatataataccatcttctctgttaatacataattgctccaagcttcctgtaaactataagaatatatttagtttacagtatatggatt

SEQ ID NO: 2801 - DNA, 200 bp, synthetic construct
  source 1..200: mol_type = other DNA
aactgcttcaatgtggtatctttgtatggcaatgtatatagatttttttaaaagaataaatgttgttttgcaaatgtaggttcttagagtccacccagggaattttttatctgtctagtctgaacctgaggtggtaagagattaaaaaatgcttgttttatgttcttttttttttgagtcggagtcttgcactgttgcct

SEQ ID NO: 2802 - DNA, 200 bp, synthetic construct
  source 1..200: mol_type = other DNA
accacggctgccggacgcctgagtctgtgtgtgttggggaaggtgggatggaataaaagtgcccacgagggttgagggaattcttgcagagtgacacgcttaaagtatcctggctcccgtcctggtacacgggctgcgccccgcctatgcaggcatctgccctctgtgcagactgcgttcccgaggccgcgggctacgcc

SEQ ID NO: 2803 - DNA, 200 bp, synthetic construct
  source 1..200: mol_type = other DNA
gccacccaacctaaatgtacttatctgtccccatgtccccacaccagcctgttttcataataaactttattgtgacaggcggggctgatccctcccatgttgggagtcaccatgtggcaagtgacaaagctctgagcccgcccctcttggggccacagtggtagggatgggggaaggggatggaccccatggctggggta

SEQ ID NO: 2804 - DNA, 200 bp, synthetic construct
  source 1..200: mol_type = other DNA
gtgccttcacacagcactggtttaatgtttataaacaaaatagagaaactttccttataaataaaagtagtttgcacagaaattgactttcttctcttttgattctgttttgactcaatacatgctcatcattgtggttatgatttttggcaaggcagtctgaaagtagccctttcttcttcttcttctttttttttttt

SEQ ID NO: 2805 - DNA, 200 bp, synthetic construct
  source 1..200: mol_type = other DNA
ggtctttggtgtttttaaatgattgtttcttcttcatgcttttgcttgcaatgtagtcaataaaacctcatgtactattattggatgatgatgatcttattttcttagcaagtatgtttagtttaaattttcatattgtgttcatgatcatactttactatgggttttgtagagagaaatatgagatgatagcagatctt

SEQ ID NO: 2806 - DNA, 200 bp, synthetic construct
  source 1..200: mol_type = other DNA
cagttaaatttttttaacttttattttttaaacaatgggctaaaaataaacagtattaaaaggttaagtttatataatacatatgtacacaattagtggtgttttcttttcagacaaaatactgaaacaaatattagtttaaaaacaaactatacagaagacttcataccgtaacaataaatgtatagtttcttcaaagg

SEQ ID NO: 2807 - DNA, 200 bp, synthetic construct
  source 1..200: mol_type = other DNA
atatcacctctcaaaagcatcacctctatctgcctcatctcacactgtactctccaataaagcaccttgttgaaagacctcatgtttggatattgttttattctctgtctataaactaggtctctgcctactcttttatttttatgtatttattttttctaggtggagtcttgctctgtggcccaggctggagtgcagtg

SEQ ID NO: 2808 - DNA, 200 bp, synthetic construct
  source 1..200: mol_type = other DNA
attacttcttgtgaagagtctgaaactttgtttttattttaatatatcgtaggaaaacattaaagagcagatgcatggccatttttctttgatgttctccagagttttacattacacttgtctgtcttataattgatattttaggatgtttgggtgtttgttacaggcagaattggatagatacagccctacaaatgtat

SEQ ID NO: 2809 - DNA, 200 bp, synthetic construct
  source 1..200: mol_type = other DNA
accttttcacctacaaaatttcacctgcaaaccttaaacctgcaaaattttcctttaataaaatttgcttgttttaaaaacattgtatctatttcagtatttttctctatttttgtttcaatacaatttcctgaaggttggattagagaggatgaggcagatgtggtggcaagacttttcagtaaagagttacacatcct

SEQ ID NO: 2810 - DNA, 200 bp, synthetic construct
  source 1..200: mol_type = other DNA
gccgcctggcagactcgccatcccccaacgacacagggcaggacagcagaggacgtgctgggattaaacacattccccctctactcgactcctgggttttacttctccagaccctctcccctctccaaacagggcaagttgaggagctggagcggggaggtggccgtatttggccccagtgggcgatcactctttcagct

SEQ ID NO: 2811 - DNA, 200 bp, synthetic construct
  source 1..200: mol_type = other DNA
gactccagggttctagacagaggccagtcttggccactcaccccacaccccgcggaccccaataaaggcttgcatagctccagcttctgcctgctggttctgagctctgtgaccagggccttggagaggactggggaaggggcgggaagcagtgaccctgacctgagatggccctcgggacacggcgagctctcctgtag

SEQ ID NO: 2812 - DNA, 200 bp, synthetic construct
  source 1..200: mol_type = other DNA
cagcatcctggggacggcctgcaccctctgcccgccttggggtctgctgggctgtgaaggagaataaagagttaaactgtcagaatgtgtttcttgcccagatgaagtttgtgttttgtggggggggccttgtgtaaccacggaattcctatttatggcatttcatgccttgtaaatagcaccaggagatgaggaagaga

SEQ ID NO: 2813 - DNA, 200 bp, synthetic construct
  source 1..200: mol_type = other DNA
agatccccgcgatacttcaacgccttctgacttccaggtgatgactgggcccccaataaatcccgtctttgggtctctctgccttttgcctgttttttgtcatgtatgcaaatttgttgggagaatataagtgcttctagtccctgtattctctacatctttcagaatgactcagagctgctagatttgtttatttctct

SEQ ID NO: 2814 - DNA, 200 bp, synthetic construct
  source 1..200: mol_type = other DNA
agttcagcgctgtcaggattgcgagagatgtgtgttgatactgttgcacgtgtgtttttctattaaaagactcatccgactcccatgtctgctgctcattcctccccttgacctgctgacacagggagcacgcacccttggtcaattttgcggggttgggtaaattctcactcggtcacagagcgcatgctccgtttcta

SEQ ID NO: 2815 - DNA, 200 bp, synthetic construct
  source 1..200: mol_type = other DNA
aatcttgccccagcacagtaataaaaatcaagatttgttagtaacaatcttgaagagctaattttaataaaaataagaaaaattaatactatcatgttaatactattattgtcatcccaagaaaaaagatattttaaaaatttatttgaaaagttcattataagggctttattcatgcctgatttgtttacatgaggact

SEQ ID NO: 2816 - DNA, 200 bp, synthetic construct
  source 1..200: mol_type = other DNA
acttttagttcagagcagagcctgatgcctgagatcctgggtcgtgaccagcctggcttgcttggaataaaatctttagccatgaccatgctacccatctctcctctggatcccagggacactcggccacagcaggaaatgccccctgaaggtcacacagcattgtgtcctgagggcctgcggaaagctctgtcccaggg

SEQ ID NO: 2817 - DNA, 200 bp, synthetic construct
  source 1..200: mol_type = other DNA
ccccagagcaggcctccttccctgtgtgctggggagtctcatcaccgccccctaaaaatgacgttattaaatgttgtagctctgtgagcattttcctctttcctggagcagggcagcctgggggccctgcttcctcctcctagacctcactctgggcctgggcctgggtcttctgctgcagccttacagcctcccgcctg

SEQ ID NO: 2818 - DNA, 200 bp, synthetic construct
  source 1..200: mol_type = other DNA
atattttgaatataatgtaaatattaatgtgtaagcttatattgtgtcattgttctgttttataataaaattcttgagaaccttcctttgcatcgatgacagatatttgagggttccatagtgtgaaaagacaaacccctaaccatttgcaaagcccttccggttttcactggtatgaagcaggacctggctcctcccca

SEQ ID NO: 2819 - DNA, 200 bp, synthetic construct
  source 1..200: mol_type = other DNA
ctctttgctctatggcccttcctcatcaggggaccgtttcccccctcttccttcacagtatttaagaaataaaagtcggatttttctggctgctttctctctacattgtctccattaggtagtgtgtcccttaatcttgtgtgaacttttttaaattaatacttccttggaacactgttgtgttctactcagcacgctaa

SEQ ID NO: 2820 - DNA, 200 bp, synthetic construct
  source 1..200: mol_type = other DNA
ccgggtccccttccgcaagcgcccaccgatccggaggctgcgggcagccgttatcccgtggtttaataaagctgccgcgcgctcaccaagtcctcttccgcgtctgcttccgcgtcgggcccgggcggggcggggcggggcgtggagccgcgccgcggcctgacgtcacccacacctccctgggactgcgtcactggtgc

SEQ ID NO: 2821 - DNA, 200 bp, synthetic construct
  source 1..200: mol_type = other DNA
ttttcatatcaatattttctgtgataatttattactttgtatctgatcagctgtttgtggatttaattaaaaagtacttgataaattgtaatttgaaagccgtggcagacactgtaggttgcctcatctacacccaatccctccccatcttcctttcctgtctctgtcatagagtctgtgaaagggtggtactcaatttc

SEQ ID NO: 2822 - DNA, 200 bp, synthetic construct
  source 1..200: mol_type = other DNA
aattgaagtgttgaaggatgattttttttcccctcatcttggtcagagagtggattttgtattttgtatttaacttgcattcaaaaaacaggatctcagttctcctttcttgtaaagtaagaaaatcttatttatgatatatgcagttaacttaccttgcctcaacagaagaaaggttaaatattacatttttttctttt

SEQ ID NO: 2823 - DNA, 200 bp, synthetic construct
  source 1..200: mol_type = other DNA
ctggggtttctggttttgtttctgttgtgttttgttttggtttctgtattatgtatttttgtcaacgccaataaatttctttgatttgtatttcttttcaacattcttttattttctttttttttttctttgaaattttgtttacatttttatttgtgtaatgggaaataccgtcactagctcttgggccagggaatgag

SEQ ID NO: 2824 - DNA, 200 bp, synthetic construct
  source 1..200: mol_type = other DNA
cagcatcttttcccttcatagccatcgacctgaatttctaagacaaatgtttagatgaactcttagtgttattttacgttaaaaaaattaatttgtgtctccacgtgtgctgtttcttccctgagattagaggatggagccagttctaccctcagcttctcttccctctggagagaaggtgagaggagaaagggcttctc

SEQ ID NO: 2825 - DNA, 200 bp, synthetic construct
  source 1..200: mol_type = other DNA
gccctgagtgtccagccacatggtggcaccagcaccactcctttccttaccacatcaactgattaaagcagtgaccagcaggaactgcccagagaactggctggccttgtttcctgagtctgatctgtttggcggagtgggaggggtggagcaggacccggaccctgagtggctgggatccttcttcctgtccctggctg

SEQ ID NO: 2826 - DNA, 200 bp, synthetic construct
  source 1..200: mol_type = other DNA
ggaaaaatctgtttgctgttcctgctttattgtttgctttctgtgtgctgtcatattttggtatcagagttacattaaatttgcaaaatgaattggagttttttctgtcttttaatgtgcttaggtagttgtggagtggcatcttgggttcgtagaagagctggagatcagcatagctctttggagaatgtgggtctcca

SEQ ID NO: 2827 - DNA, 200 bp, synthetic construct
  source 1..200: mol_type = other DNA
gctcccgggctccataatgtaatctgttcagcatggagtccttcttctaccgcccctgtcttaataaagctgcgtgtttcacttcggcatcaacttgcttttgctgtggtttggcatttccctccacccacacatgtgacgaaaaggggaaacaagactgggtcctggccacaacttcagctgaggaacttggcacggcc

SEQ ID NO: 2828 - DNA, 200 bp, synthetic construct
  source 1..200: mol_type = other DNA
agacagagctcctcaaaccattgtggatatcttctgccttcaaccacagatcaaatacttcaagagccatttaataaatatggcagaactatatatgtgtcttaaacctcaaagtaaattttccttgagaaataatttatgttgaaaagatttcctggccaagtgcagtggctcacacccgtaatcccagcactttggga

SEQ ID NO: 2829 - DNA, 200 bp, synthetic construct
  source 1..200: mol_type = other DNA
agcagaactcttgacttcctgccatggatctcttgggcccaggactgttgatgcctttgagttttgtattcaataaactttttttgtctgttgataatattttaattgctcagtgatgttccataacccggctggctcagctggagtgctgggagatgagggcctcctggatcctgctcccttctgggctctgactctcc

SEQ ID NO: 2830 - DNA, 200 bp, synthetic construct
  source 1..200: mol_type = other DNA
acagaaaactttgcttatttcttttgcagcaataagcatgcataataagtcacagccaaatgcttccatttgtaatcaagttatacataattataaccgagggctggcgttttggaatgcaatttgcacagggattggaacatgatttatagttaaaagcctaatatgcagaaatgaattaagatcattttgttgttcat

SEQ ID NO: 2831 - DNA, 200 bp, synthetic construct
  source 1..200: mol_type = other DNA
actaccttcccaaaagagaacatcagaggttttcattgctgaaaagaaaatcgtaaaaacagaaaatgtcataggaataaaaaaattatcttttcatatctgcaagatttttttcatcaataaaaattatccttgaaacaagtgagcttttgtttttggggggagatgtttactacaaaattaacatgagtacatgagta

SEQ ID NO: 2832 - DNA, 200 bp, synthetic construct
  source 1..200: mol_type = other DNA
ggaagccctgtctgtttgccacacccaggtgatttcctctaaagaaacttggctggaatttctgctgtggtctataaaataaacttcttaacatgcttctccatgttctgttgtatctccaaaatctgctcctgaagaaccccagattacctgaaatttctagaacatttgtctttcaaagaacctttactgaggagatt

SEQ ID NO: 2833 - DNA, 200 bp, synthetic construct
  source 1..200: mol_type = other DNA
gacagcttcagactttgtttttttaacaatttgaaaaattattctttaatgtataaagtaattttatgtaaattaataaatcataatttcatttccacattgattaaagctgctgtatagatttagggtgcaggacttaataatagtatagttattgtttgtttttaagaaaagctcagttctagagtcatactattact

SEQ ID NO: 2834 - DNA, 200 bp, synthetic construct
  source 1..200: mol_type = other DNA
agactttccatatcaagagtcatggtattgactcaacagtttccagtcatggccaaatgttcaatatgagtctcaataaactgaatttttcttgcgaatgttgaatacgtcttatttttaaatattgttgtatttaaataggcttttgagtactcaaagcctcagctagtagtacattttctggattctattaacagttt

SEQ ID NO: 2835 - DNA, 200 bp, synthetic construct
  source 1..200: mol_type = other DNA
ttcagagcatgagtcttttagttcagagcagagcctgatgcctgagatcctgggtcgtgaccagcctggcttgcttggaataaaatctttagccatgaccatgctacccatctctcctctggatcccagggacactcggccacagcaggaaatgccccctgaaggtcacacagcattgtgtcctgagggcctgcggaaag

SEQ ID NO: 2836 - DNA, 200 bp, synthetic construct
  source 1..200: mol_type = other DNA
tgtgaatcaacttcttgggccttggctctgagttggaaaaggttttagaaaaagtgaagagctggaatgtgggggaaaataaaaagcttttttgcccagtggcgtgtatggtgtttattgggggttggattgaggtggggattttagggtaggcaggcttagaagttttgggggactctttcctgttgactctctagttt

SEQ ID NO: 2837 - DNA, 200 bp, synthetic construct
  source 1..200: mol_type = other DNA
cagccaccacattttcaaaacagatttgtaaaaattgtatttgttaacactgtgcacaaacgttttatactaaataaatatcaaactacattcttctgaaagatgtttctattatttcttaggtcacttccatatatattatgtatagtgaaaccatttttaaaaagcaatgacttaggcaaaccaaccctagtttgtta

SEQ ID NO: 2838 - DNA, 200 bp, synthetic construct
  source 1..200: mol_type = other DNA
tgagccctgttcctgctcatcatgaagatccccgcgatacttcaacgccttctgacttccaggtgatgactgggcccccaataaatcccgtctttgggtctctctgccttttgcctgttttttgtcatgtatgcaaatttgttgggagaatataagtgcttctagtccctgtattctctacatctttcagaatgactcag

SEQ ID NO: 2839 - DNA, 200 bp, synthetic construct
  source 1..200: mol_type = other DNA
gctgcctgcctgacaaggtcagcatcatttgctctcctgaatttatgaggtttatttatttttctctttcctactcctattaaagaacctcgtcccagtgtttcctgcttaagcctggtctctattctacaggtagaaaatgggggcagggtagtggagtgcccctgaaatgaaacgggctggggaaaaaaaaatctctt

SEQ ID NO: 2840 - DNA, 200 bp, synthetic construct
  source 1..200: mol_type = other DNA
gggccaagcccccaccccatcccactccccttccctccccagatatttatgtgaaatgaactgcagctttattttttgaaataaaaacttttaaaaagcacctctcttctgccttattcttcctgcctcacactcatgctgtgtcctgccttcttcaaaaatcctctgagtttcattgtgaagaagggcctgtcctctat

SEQ ID NO: 2841 - DNA, 200 bp, synthetic construct
  source 1..200: mol_type = other DNA
agtttttgcagaaatggggcagagggacaccctttgggcgtggcttcctggtgatgggaagggtcttgtgttttaatgccaataaatgtgccagctgggcagaatgttggtcttttcttggattaagcaagggactggtgatgagatggggggtgtggtcgagagtgtgggccccgactcagagcctgatgcgcaggggt

SEQ ID NO: 2842 - DNA, 200 bp, synthetic construct
  source 1..200: mol_type = other DNA
cgagctggagcagatcgtgctgcacaaccggagaagacagaattacctctgctcttttaatatataatgatggctttaaataaaattaggagaaaatgtcgaagcagcagctccttccactcttggcctgggtggccctagttccactgtacactttggccactgcgtcactgccggttccagggcagccgggagcccca

SEQ ID NO: 2843 - DNA, 200 bp, synthetic construct
  source 1..200: mol_type = other DNA
gtgaacatcacctttttatagcattaaattcattttttaaaatgataaatgctggagggggccatctgatttgaataaagttgaaagaacatgttaaagtcagtcttaaggagtcacgtttgagtatgtaaattttgatctttctaatatgttggtttgtatattcagttttaactgtatgaatctgatttgcaaatgag

SEQ ID NO: 2844 - DNA, 200 bp, synthetic construct
  source 1..200: mol_type = other DNA
tctgtgtgctcttatcaccaatcagttcagacctggttgattttgtactttggaactgtaccttggatggttttgtttattaaaagagaaacctgaagtactcattttgctataacttgtcttctctaagcaggacagatataggaagtagaatttcttttaattttcttcatttttcccacccttttctatttttctga

SEQ ID NO: 2845 - DNA, 200 bp, synthetic construct
  source 1..200: mol_type = other DNA
gtgcagagtgtcgatatcgcagctttcaacaagatctgaagcctgagtgtgtgtacgtgcgcgcgtgcgtgaggccctgccacgattaaagactgagtccggccctctggctccgtcctggtcatttcctgctcgtacctggcctgtctccctccctgtctcagccccatctctgccctgctgttcccacacagtcatcc

SEQ ID NO: 2846 - DNA, 200 bp, synthetic construct
  source 1..200: mol_type = other DNA
ccatcagacgaacacaagagaggctcaaacaagaaattcactgtgtacactctctaagacattctccaaattgattttatctctttaaataaaaactttaaataaaagtattagaaatgttttctctgcgtagaaattaggaagcttggagtgaactttgctgtgcttctgatttcaggcttttggcaagagttctgtct

SEQ ID NO: 2847 - DNA, 200 bp, synthetic construct
  source 1..200: mol_type = other DNA
ggtccagagagcggggccacgtgtcacccacgtctgcgcttggtcacccgtcctccccaccctgtgtgtgtttatgtcatagttacattaaattccattcattgaatactccacagccttcctctgatgcagcgtggtcccaactcctcctgcgtgaccacagggcttgcctggttttgtcgccgaccttccctgtggcc

SEQ ID NO: 2848 - DNA, 200 bp, synthetic construct
  source 1..200: mol_type = other DNA
gcagtcaccaaaaaatttatatattttgctcatatacatttccatattataattatagaagatgtataatctatttagatgttaattaaaggaaacaaacaactgaagcttttgaagggtcattagtaatgtttcaggttcctttattttggccaaaggggtcttgtctttagacagttctgtcctgctacagagagaga

SEQ ID NO: 2849 - DNA, 200 bp, synthetic construct
  source 1..200: mol_type = other DNA
gtaacaaccagatggcttcactgaaacctgcttttgtaaattacttttttttactgttgctggaagtgtcccacctgctgctcataataaatgcagatgtatagcagtcctgtctggggcccattctgcaggggtggtgggtgctgggacctacattgcttccccaatctcttccctttcccatttctcatctgcctttc

SEQ ID NO: 2850 - DNA, 200 bp, synthetic construct
  source 1..200: mol_type = other DNA
atgaatctttgaaaagctggtaaaagacatgaccatgaagaaatctgaactttttaatattgttaaatatcttgacaaaataaagatgttagtagtttgacaactgaatctgttgtgttttaggccttatatttttaatgttttgattttgttacactatgttctgtttctttctttccttccttctttctttccttcct

SEQ ID NO: 2851 - DNA, 200 bp, synthetic construct
  source 1..200: mol_type = other DNA
catgacctcaattatttcacttaaccccaggccattatcatatccagatggtcttcagagttgtctttatatgtgaattaagttatattaaattttaatctatagtaaaaacatagtcctggaaataaattcttgcttaaatggtggttctttctgctattggctactggataacattcttcattggctagacacagtgg

SEQ ID NO: 2852 - DNA, 200 bp, synthetic construct
  source 1..200: mol_type = other DNA
acttacaggatgtcttaggattgtttttctcatcaggatacattaaaaatacaatacagcacgtcaaaccacagaatatttattgagtaataaacttgtggcacacaatccagctgtatttttttgcattcattcattttccattctgcaacctccatcacattagcagagtaaccagtaagttgttttctattttctaa

SEQ ID NO: 2853 - DNA, 200 bp, synthetic construct
  source 1..200: mol_type = other DNA
agaggccatagtacctcctgtttgaagttgtttattcacatctatcttatttgaagaaaaagactgatgtaatagatctttgtcattaaagctgaacttttaaagaagtttacgaaccttctttctttgcactgatatatgaaaataatgtttgggcgttcctattgatgtgtaggctggcttcccggactagcacacga

SEQ ID NO: 2854 - DNA, 200 bp, synthetic construct
  source 1..200: mol_type = other DNA
ggcaccttggccctgcgcatcatggactctctcagcttccctcccaggatcagtttctacacaactctgtgtggcttttggacaaattaaagctagttttggtatccccgggccagttttctttgtagttaagcttcgcctgctgaccctccctgccccctccccacagcagctacttcaggactcccccagggaaggca

SEQ ID NO: 2855 - DNA, 200 bp, synthetic construct
  source 1..200: mol_type = other DNA
tgagaatcctcatcttcctgccccgctttcctctcccatcctcatcccccacactgggatagatgcttgtttgtaaaaactcaccttaataaagacttagatgttgctttgttgttgtctctgtatgacagctgtctagtgatgggtggatcagtcgctgtttggtcatcactgcaccatcagcatgcagctgctaaaat

SEQ ID NO: 2856 - DNA, 200 bp, synthetic construct
  source 1..200: mol_type = other DNA
gccagaggctgtttactatgacatctcctctttatttattaggttatttatcttatttatttttttatttttcttacttgagataataaagagttccagaggaggataagaatgagcatgtgtgagtgtctgagggaagacatggcagctgttttgtctcccttggcccggacaatcccctctacacctcccctcacgtg

SEQ ID NO: 2857 - DNA, 200 bp, synthetic construct
  source 1..200: mol_type = other DNA
tctctgaaagactagactgtcttatattatgagatacttgaatgctgcatgtaaagcctttaaagcaaaatcctcagaaatggtctaaataaaacacttgatatgcctagagaacacagcaaatgttttggttactggaattttggttgcaatagtttagaagcaataggaccaaatattgcttgttaggaggtggggta

SEQ ID NO: 2858 - DNA, 200 bp, synthetic construct
  source 1..200: mol_type = other DNA
tgataccctcaaatctaattggatgtgctttcgcctttgcatgtaagtacggtagtaagaaacctttgagatctttctgacttttcaaaattagagaaagcaaatgggatggatagattttttttttcttttcaaggggggcaggaaggtaatggtttgagtagcctttgtttaaaaaaaagactaaatatatttaaaag

SEQ ID NO: 2859 - DNA, 200 bp, synthetic construct
  source 1..200: mol_type = other DNA
ctcctgcgctccccggcactgtgggacttcggccttccagaaggaggttttggccctgggcctctctggacgtggcctgttttctatcaataaacagacattacttccagatgctggggcctgtggccctcgtggcctttctttttctggagttagaacgattgctctgaatccctggtgctgctgggtgggacatagga

SEQ ID NO: 2860 - RNA, 20 nt, synthetic construct
  source 1..20: mol_type = other RNA
ctgcattctagttgtggttt

SEQ ID NO: 2861 - DNA, 156 bp, synthetic construct
  source 1..156: mol_type = other DNA
cctaggcaacagaaggctaaagaaggtatattgctgttgacagtgagcgacgctgatcatcaattacttactgtgaagccacagatgggtaagtaattgatgatcagcgctgcctactgcctcggacttcaaggggctactttaggagcaattatc

SEQ ID NO: 2862 - DNA, 156 bp, synthetic construct
  source 1..156: mol_type = other DNA
cctaggcaacagaaggctaaagaaggtatattgctgttgacagtgagcgacgcaactgcgccttcatttactgtgaagccacagatgggtaaatgaaggcgcagttgcgctgcctactgcctcggacttcaaggggctactttaggagcaattatc

SEQ ID NO: 2863 - DNA, 156 bp, synthetic construct
  source 1..156: mol_type = other DNA
cctaggcaacagaaggctaaagaaggtatattgctgttgacagtgagcgacgctgagcaagcacattaaactgtgaagccacagatgggtttaatgtgcttgctcagcgctgcctactgcctcggacttcaaggggctactttaggagcaattatc

SEQ ID NO: 2864 - DNA, 156 bp, synthetic construct
  source 1..156: mol_type = other DNA
cctaggcaacagaaggctaaagaaggtatattgctgttgacagtgagcgacgcctgatcatcaattactactgtgaagccacagatgggtagtaattgatgatcaggcgctgcctactgcctcggacttcaaggggctactttaggagcaattatc

SEQ ID NO: 2865 - DNA, 156 bp, synthetic construct
  source 1..156: mol_type = other DNA
cctaggcaacagaaggctaaagaaggtatattgctgttgacagtgagcgacggtacctgatcatcaattactgtgaagccacagatgggtaattgatgatcaggtaccgctgcctactgcctcggacttcaaggggctactttaggagcaattatc

SEQ ID NO: 2866 - DNA, 156 bp, synthetic construct
  source 1..156: mol_type = other DNA
cctaggcaacagaaggctaaagaaggtatattgctgttgacagtgagcgacgttcatttggcagaaagaactgtgaagccacagatgggttctttctgccaaatgaacgctgcctactgcctcggacttcaaggggctactttaggagcaattatc

SEQ ID NO: 2867 - DNA, 156 bp, synthetic construct
  source 1..156: mol_type = other DNA
cctaggcaacagaaggctaaagaaggtatattgctgttgacagtgagcgacgcatcaattacttcaaagactgtgaagccacagatgggtctttgaagtaattgatgcgctgcctactgcctcggacttcaaggggctactttaggagcaattatc

SEQ ID NO: 2868 - DNA, 156 bp, synthetic construct
  source 1..156: mol_type = other DNA
cctaggcaacagaaggctaaagaaggtatattgctgttgacagtgagcgacgtacctgatcatcaattaactgtgaagccacagatgggttaattgatgatcaggtacgctgcctactgcctcggacttcaaggggctactttaggagcaattatc

SEQ ID NO: 2869 - DNA, 156 bp, synthetic construct
  source 1..156: mol_type = other DNA
cctaggcaacagaaggctaaagaaggtatattgctgttgacagtgagcgacgctgatcttcgagaatctactgtgaagccacagatgggtagattctcgaagatcagcgctgcctactgcctcggacttcaaggggctactttaggagcaattatc

SEQ ID NO: 2870 - DNA, 156 bp, synthetic construct
  source 1..156: mol_type = other DNA
cctaggcaacagaaggctaaagaaggtatattgctgttgacagtgagcgacggaagaagggcaagaagtactgtgaagccacagatgggtacttcttgcccttcttccgctgcctactgcctcggacttcaaggggctactttaggagcaattatc

SEQ ID NO: 2871 - DNA, 156 bp, synthetic construct
  source 1..156: mol_type = other DNA
cctaggcaacagaaggctaaagaaggtatattgctgttgacagtgagcgacggatcaacgagaagaaagactgtgaagccacagatgggtctttcttctcgttgatccgctgcctactgcctcggacttcaaggggctactttaggagcaattatc

SEQ ID NO: 2872 - DNA, 156 bp, synthetic construct
  source 1..156: mol_type = other DNA
cctaggcaacagaaggctaaagaaggtatattgctgttgacagtgagcgacggaagagttccagaaagaactgtgaagccacagatgggttctttctggaactcttccgctgcctactgcctcggacttcaaggggctactttaggagcaattatc

SEQ ID NO: 2873 - RNA, 156 nt, synthetic construct
  source 1..156: mol_type = other RNA
cctaggcaacagaaggctaaagaaggtatattgctgttgacagtgagcgacgctgatcatcaattacttactgtgaagccacagatgggtaagtaattgatgatcagcgctgcctactgcctcggacttcaaggggctactttaggagcaattatc

SEQ ID NO: 2874 - RNA, 156 nt, synthetic construct
  source 1..156: mol_type = other RNA
cctaggcaacagaaggctaaagaaggtatattgctgttgacagtgagcgacgcaactgcgccttcatttactgtgaagccacagatgggtaaatgaaggcgcagttgcgctgcctactgcctcggacttcaaggggctactttaggagcaattatc

SEQ ID NO: 2875 - RNA, 156 nt, synthetic construct
  source 1..156: mol_type = other RNA
cctaggcaacagaaggctaaagaaggtatattgctgttgacagtgagcgacgctgagcaagcacattaaactgtgaagccacagatgggtttaatgtgcttgctcagcgctgcctactgcctcggacttcaaggggctactttaggagcaattatc

SEQ ID NO: 2876 - RNA, 156 nt, synthetic construct
  source 1..156: mol_type = other RNA
cctaggcaacagaaggctaaagaaggtatattgctgttgacagtgagcgacgcctgatcatcaattactactgtgaagccacagatgggtagtaattgatgatcaggcgctgcctactgcctcggacttcaaggggctactttaggagcaattatc

SEQ ID NO: 2877 - RNA, 156 nt, synthetic construct
  source 1..156: mol_type = other RNA
cctaggcaacagaaggctaaagaaggtatattgctgttgacagtgagcgacggtacctgatcatcaattactgtgaagccacagatgggtaattgatgatcaggtaccgctgcctactgcctcggacttcaaggggctactttaggagcaattatc

SEQ ID NO: 2878 - RNA, 156 nt, synthetic construct
  source 1..156: mol_type = other RNA
cctaggcaacagaaggctaaagaaggtatattgctgttgacagtgagcgacgttcatttggcagaaagaactgtgaagccacagatgggttctttctgccaaatgaacgctgcctactgcctcggacttcaaggggctactttaggagcaattatc

SEQ ID NO: 2879 - RNA, 156 nt, synthetic construct
  source 1..156: mol_type = other RNA
cctaggcaacagaaggctaaagaaggtatattgctgttgacagtgagcgacgcatcaattacttcaaagactgtgaagccacagatgggtctttgaagtaattgatgcgctgcctactgcctcggacttcaaggggctactttaggagcaattatc

SEQ ID NO: 2880 - RNA, 156 nt, synthetic construct
  source 1..156: mol_type = other RNA
cctaggcaacagaaggctaaagaaggtatattgctgttgacagtgagcgacgtacctgatcatcaattaactgtgaagccacagatgggttaattgatgatcaggtacgctgcctactgcctcggacttcaaggggctactttaggagcaattatc

SEQ ID NO: 2881 - RNA, 156 nt, synthetic construct
  source 1..156: mol_type = other RNA
cctaggcaacagaaggctaaagaaggtatattgctgttgacagtgagcgacgctgatcttcgagaatctactgtgaagccacagatgggtagattctcgaagatcagcgctgcctactgcctcggacttcaaggggctactttaggagcaattatc

SEQ ID NO: 2882 - RNA, 156 nt, synthetic construct
  source 1..156: mol_type = other RNA
cctaggcaacagaaggctaaagaaggtatattgctgttgacagtgagcgacggaagaagggcaagaagtactgtgaagccacagatgggtacttcttgcccttcttccgctgcctactgcctcggacttcaaggggctactttaggagcaattatc

SEQ ID NO: 2883 - RNA, 156 nt, synthetic construct
  source 1..156: mol_type = other RNA
cctaggcaacagaaggctaaagaaggtatattgctgttgacagtgagcgacggatcaacgagaagaaagactgtgaagccacagatgggtctttcttctcgttgatccgctgcctactgcctcggacttcaaggggctactttaggagcaattatc

SEQ ID NO: 2884 - RNA, 156 nt, synthetic construct
  source 1..156: mol_type = other RNA
cctaggcaacagaaggctaaagaaggtatattgctgttgacagtgagcgacggaagagttccagaaagaactgtgaagccacagatgggttctttctggaactcttccgctgcctactgcctcggacttcaaggggctactttaggagcaattatc

SEQ ID NO: 2885 - DNA, 164 bp, synthetic construct; identical to SEQ ID NO: 2668
  source 1..164: mol_type = other DNA

SEQ ID NO: 2886 - DNA, 167 bp, synthetic construct; identical to SEQ ID NO: 2669
  source 1..167: mol_type = other DNA

SEQ ID NO: 2887 - DNA, 168 bp, synthetic construct; identical to SEQ ID NO: 2670
  source 1..168: mol_type = other DNA

SEQ ID NO: 2888 - DNA, 167 bp, synthetic construct; identical to SEQ ID NO: 2671
  source 1..167: mol_type = other DNA

SEQ ID NO: 2889 - RNA, 164 nt, synthetic construct; identical to SEQ ID NO: 2620
  source 1..164: mol_type = other RNA

SEQ ID NO: 2890 - RNA, 167 nt, synthetic construct; identical to SEQ ID NO: 2621
  source 1..167: mol_type = other RNA

SEQ ID NO: 2891 - RNA, 168 nt, synthetic construct; identical to SEQ ID NO: 2622
  source 1..168: mol_type = other RNA

SEQ ID NO: 2892 - RNA, 167 nt, synthetic construct; identical to SEQ ID NO: 2623
  source 1..167: mol_type = other RNA

SEQ ID NO: 2893 - RNA, 20 nt, synthetic construct
  source 1..20: mol_type = other RNA
cgagacgtaattacgtctcg

SEQ ID NO: 2894 - DNA, 117 bp, synthetic construct
  source 1..117: mol_type = other DNA
aaagcgcctgccgaaacggtattccgaggcgccgcgtcgaatcgctatggtgtggttgttcccattagtcggcaaagagacagttgtagcggctgggaacgagacgaattcgtctct

SEQ ID NO: 2895 - DNA, 106 bp, synthetic construct
  source 1..106: mol_type = other DNA
aaagcgcctgccgaaacggtattccgaggcgccgcgtcgaatcgctatggtgtggttgttcccattagtcggcaaagagacagttgtagcggctgggaattttttt

SEQ ID NO: 2896 - DNA, 117 bp, synthetic construct; identical to SEQ ID NO: 2894
  source 1..117: mol_type = other DNA

SEQ ID NO: 2897 - DNA, 106 bp, synthetic construct; identical to SEQ ID NO: 2895
  source 1..106: mol_type = other DNA

SEQ ID NO: 2898 - DNA, 107 bp, synthetic construct
  source 1..107: mol_type = other DNA
actggcgcttttatctgattactttgagagccatcaccagcgactatgtcgtagtgggtaaagctccctcttcggagggagcatcaaagcgagacgaattcgtctct

SEQ ID NO: 2899 - DNA, 89 bp, synthetic construct; identical to SEQ ID NO: 691
  source 1..89: mol_type = other DNA

SEQ ID NO: 2900 - DNA, 116 bp, synthetic construct
  source 1..116: mol_type = other DNA
actggcgcttctatctgattactctgagcgccatcaccagcgactatgtcgtatgggtaaagcgccttacggacttcggtccgtaaggagcatcagagcgagacgaattcgtctct

SEQ ID NO: 2901 - DNA, 98 bp, synthetic construct; identical to SEQ ID NO: 697
  source 1..98: mol_type = other DNA

SEQ ID NO: 2902 - DNA, 117 bp, synthetic construct
  source 1..117: mol_type = other DNA
actggcgcttctatctgattactctgagcgccatcaccagcgactatgtcgtagtgggtaaagccgcttacggacttcggtccgtaagaggcatcagagcgagacgaattcgtctct

SEQ ID NO: 2903 - DNA, 99 bp, synthetic construct; identical to SEQ ID NO: 698
  source 1..99: mol_type = other DNA

SEQ ID NO: 2904 - DNA, 400 bp, synthetic construct
  source 1..400: mol_type = other DNA
accaagtgacgatcacagctatccacaaacaagaactgcgacccaaatcccggctgcgacggaactagctgtgccacacccggcgcgtccttatataatcatcggcgttcaccgccccaaggagatccctccgcagaatcgccgagaagggactacttttcctcgcctgttccgctctctggaaagaaaaccagtgccctagagtcacccaagtcccgtcctaaaatgtccttctgctgatactggggttctaaggctgagtcttatgagcagcgggctgctgtcctgagcgtccaggcggaaggatcaggaggctcgctgcgcccttcgtctgacgtggcagcgctcgccgtgaggaggggggcgcccgcgggaggcgccaaaacccggtgcggaggcc

SEQ ID NO: 2905 - DNA, 400 bp, synthetic construct
  source 1..400: mol_type = other DNA
accaagtgatgatcacagctatccacaaacaagaactgagacccaaatcccagctgccacggaactagctgtgccacacccggtgtctccttatataatcataggaattcaccgccccaaggagatccctccgcagaattgccgagaagggactacttttcctagcctgttccactctctggaaagaaaaccagtgccctagagtcacccaagtcccttcctaaaatgtccttctgctgatactggggttctaaggctgagtcttatgagcagagggctgctgtcctgagggtccaggcggaaggatcaggaggctcactgagcccttcgtctgacgtggcagatctggccgtgaggaggggggaacccgcgggaggcaccaaaacccggtggggaggcc

SEQ ID NO: 2906 - DNA, 400 bp, synthetic construct
  source 1..400: mol_type = other DNA
accaagtgatgatcacagctatccacaaacaagaactgagacccaaatcccagctgccatggaactagctgtgccacacctggtgtctccttatataatcataggaattcactgccccaaggagatccctctgcagaattgctgagaagggactacttttcctagcctgttccactctctggaaagaaaaccagtgccctagagtcacccaagtcccttcctaaaatgtccttctgctgatactggggttctaaggctgagtcttatgagcagagggctgctgtcctgagggtccaggtggaaggatcaggaggctcactgagccctttgtctgatgtggcagatctggctgtgaggaggggggaacctgtgggaggcaccaaaacctggtggggaggcc

SEQ ID NO: 2907 - DNA, 252 bp, synthetic construct
  source 1..252: mol_type = other DNA
aatggaggcggtactatgtagatgagaattcaggagcaaactgggaaaagcaactgcttccaaatatttgtgatttttacagtgtagttttggaaaaactcttagcctaccaattcttctaagtgttttaaaatgtgggagccagtacacatgaagttatagagtgttttaatgaggcttaaatatttaccgtaactatgaaatgctacacatatcatgctgttcaggctctgtggccatgcaactcatact

SEQ ID NO: 2908 - DNA, 252 bp, synthetic construct
  source 1..252: mol_type = other DNA
aatggaggtggtactatgtagatgagaattcaggagcaaactgggaaaagcaactgcttccaaatatttgtgatttttacagtgtagttttggaaaaactcttagcctaccaattcttctaagtgttttaaaatgtgggagccagtacacatgaagttatagagtgttttaatgaggcttaaatatttactgtaactatgaaatgctacacatatcatgctgttcaggctctgtggccatgcaactcatact

SEQ ID NO: 2909 - DNA, 241 bp, synthetic construct
  source 1..241: mol_type = other DNA
gagggcctatttcccatgattccttcatatttgcatatacgatacaaggctgttagagagataattggaattaatttgactgtaaacacaaagatattagtacaaaatatttgatgtagaaagtaataatttcttgggtagtttgcagttttaaaattatgttttaaaatggactatcatatgcttaccgtaacttgaaagtatttctatttcttggctttatatatcttgtggaaaggac

SEQ ID NO: 2910 - DNA, 241 bp, synthetic construct
  source 1..241: mol_type = other DNA
gagggcctatttcccatgattccttcatatttgcatatacaatacaaggctgttagagagataattggaattaatttgactgtaaacacaaagatattagtacaaaatatttgatgtagaaagtaataatttcttgggtagtttgcagttttaaaattatgttttaaaatggactatcatatgcttaccataacttgaaagtatttctatttcttggctttatatatcttgtggaaaggac

SEQ ID NO: 2911 - DNA, 249 bp, synthetic construct
  source 1..249: mol_type = other DNA
gccacctcttttgcatattggcacccacaatccaccgcggctatgaggccagtataagggggtaaaattatgataagatatgggattttacgtgatggaagacatcaaagtaagtgtaagcagaaaagttgttctgcaacataccactgtaggaaattatgctaaatatgaaactgaccataagttatcctaaccaaaagatgatttgattgaagggcttaaaataggtgtgacagtaacccttgagtc

SEQ ID NO: 2912 - DNA, 249 bp, synthetic construct
  source 1..249: mol_type = other DNA
gccacctcttttgcatattggcacccacaatccacctgggctatgaggccagtataagggggtaaaattatgataagatatgggattttacttgatggaagacatcaaagtaagtgtaagcagaaaagttgttctgcaacataccactgtaggaaattatgctaaatatgaaactgaccataagttatcctaaccaaaagatgatttgattgaagggcttaaaataggtgtgacagtaacccttgagtc

SEQ ID NO: 2913 - DNA, 249 bp, synthetic construct
  source 1..249: mol_type = other DNA
tcccttacccagggtgccccaggagctcatttgcatgtcccacccaacaggtaaacctgacagatcagtggccaccaggtatggcctggccatcagagcaccaaacttatgagccttgtgatgagttctattacatgaaattctcctaaaggctccaagatggacaggaaagggctaaattaggttaccctaaggaaaacaaatgagaaactctggtgccttataagacctggggatagacttatttgc

SEQ ID NO: 2914 - DNA, 249 bp, synthetic construct
  source 1..249: mol_type = other DNA
cccttacccagggtgcccagggctctcatttgcatgtcccacccaacaggtaaacctgacaggtcatgctggccaggtacaacctggaggtcagagcaccaaacatacaagccttgtgatgagttccattgcatgaaattctcccaaaggctccaagatggacaggaaagggtgcagttaagtcaccctaagtagaataggtgaaagactctgatgccttataaggcctgtgggtgacttcttctcaac

SEQ ID NO: 2915 - DNA, 244 bp, synthetic construct
  source 1..244: mol_type = other DNA
caggctctgccccccaggctatttgcatataaccatttccagtaattcccagcagccactgtagctatatttggtagaacaacaagcactttctcaactccagtcaataactacattagttgcattacacattgggctaatataaatagaggttaaatctctaggtcatttaagagaagttggcctatgtgtacagacatttgttccaggggctttaaatagctggtggtggaactcaatattc

SEQ ID NO: 2916 - DNA, 3006 bp, synthetic construct
  source 1..3006: mol_type = other DNA
atggctccagctgccaagagagtgaagctggactctagacaagagatcaagaggatcaacaagattagaagaaggctggtcaaggacagcaacaccaagaaggcaggcaagacaggccccatgaagaccctgcttgtcagagtgatgacccctgacctgagagagagactggaaaacctgagaaagaagcctgagaacatccctcagcctatctccaacaccagcagagccaacctgaacaagctgctgacagactacacagagatgaagaaagccatcctgcatgtgtactgggaagagttccagaaagaccctgtgggcctgatgagcagagtggcccagcctgccagcaagaagattgaccagaacaaactgaagccagagatggatgagaagggcaacctgaccacagctggctttgcctgctctcagtgtggccagcctctgtttgtgtacaagctggaacaagtgtctgagaaaggcaaggcctacaccaactactttggcagatgcaatgtggctgagcatgagaagctgatcctgctggcccagctgaagcctgaaaaggactctgatgaggctgtgacctacagcctgggcaagtttggacagagagccctggacttctacagcatccatgtgaccaaagaaagcacacaccctgtgaagcccctggctcagattgctggcaacagatatgcctctggacctgtgggcaaagccctgtctgatgcctgcatgggaaccattgccagctttctgagcaagtaccaggacatcatcattgagcaccagaaagtggtcaaggggaaccagaagaggctggaatctctgagagagctggctggcaaagagaacctggaatacccctctgtgaccctgcctcctcagcctcacaccaaagagggtgttgatgcctacaatgaagtgattgccagagtcaggatgtgggtcaacctgaatctgtggcagaagctgaagctgagcagggatgatgccaagcctctgctgagactgaagggcttccctagcttcccactggtggaaaggcaggctaatgaagtggattggtgggacatggtctgcaatgtgaagaaactgatcaatgagaagaaagaggatggcaaggttttctggcagaacctggctggctacaagaggcaagaagccctgaggccttacctgtcctctgaggaagataggaagaaggggaagaagtttgccagataccagctgggagatctgctgctgcacctggaaaagaaacatggggaagattggggcaaagtgtatgatgaggcctgggagagaattgacaagaaggtggaaggcctgagcaagcacattaagctggaagaggaaagaagatctgaggatgcccagagcaaggctgccctgactgattggctgagagccaaggccagctttgtgattgagggcctgaaagaggctgacaaggatgagttctgtagatgtgaactgaagctgcaaaagtggtatggggacctgaggggcaagccctttgccattgaggcagagaacagcatcctggacatcagtggcttcagcaagcagtacaactgtgccttcatttggcagaaggatggggttaagaagctcaacctgtacctgatcatcaactacttcaaaggtggcaagctgaggttcaagaagatcaagccagaggcctttgaggccaacaggttctacacagtgatcaacaaaaagtctggggagattgtgcccatggaagtgaacttcaactttgatgatcccaacctcatcatcctgccactggcctttggcaagagacagggcagagaattcatctggaatgacctgctgagcctggaaacaggcagcctgaaactggccaatggcagagtgattgagaaaaccctgtacaacagaaggaccagacaggatgagcctgcactgtttgtggccctgacctttgagagaagggaagtgctggatagcagcaacatcaagcccatgaacctgattggagtggacagaggggagaatatccctgctgtcattgccctgacagaccctgagggctgtcccctgagcagattcaaggactccctgggcaaccccacacacattctgagaattggggagagctacaaagagaagcagagaaccatccaggccaagaaagaagtggaacagaggagagctggaggctactctaggaagtatgccagcaaagccaagaatctggctgatgacatggtcagaaacacagccagggacctgctgtactatgctgtgacccaggatgccatgctgatctttgagaatctgagcagaggatttgggagacaaggcaagaggaccttcatggctgaaagacagtacaccaggatggaagattggctgactgccaaactggcctatgagggactgagcaagacctacctgtccaagacactggcccagtatacctccaagacctgcagcaattgtggcttcaccatcacctctgcagactatgacagagtgctggaaaagctcaagaaaacagccacaggctggatgaccaccatcaatgggaaagagctgaaggttgagggccagatcacctactacaacagatacaaaaggcagaatgtggttaaggacctgtctgtggaactggacagactgtctgaggaatctgtgaacaatgacatcagcagctggaccaagggcagatctggggaagctctgagcctgctgaagaagagattcagccacagacctgtgcaagagaagtttgtgtgtctgaactgtggctttgagacacatgctgatgaacaggctgctctgaacattgccagaagctggctgttcctgagaagccaagagtacaagaagtaccagaccaacaagaccacaggcaacactgacaagagggcctttgtggaaacctggcagagcttctacagaaagaaactcaaagaagtctggaagcctgctgtgggcagccctgcagctaaaagggtcaagctggactga

SEQ ID NO: 2917 - DNA, 208 bp, synthetic construct
  source 1..208: mol_type = other DNA
ctgtgccttctagttgccagccatctgttgtttgcccctccccagtgccttccttgaccctggaaggtgccactcccactgtcctttcctaataaaatgaggaaattgcatcacattgtctgagtaggtgtcattctattctggggggtggggtggggcaggacagcaagggggaggattgggaagagaatagcaggcatgctgggga

SEQ ID NO: 2918 - DNA, 129 bp, synthetic construct
  source 1..129: mol_type = other DNA
tgctcactcactcactcactgaggcctgcagagcaaagctctgcagtctggggacctttggtccccaggcctcagtgagtgagtgagtgagcagagagggagtggccaactccatcactaggggttcct

SEQ ID NO: 2919 - DNA, 131 bp, synthetic construct
  source 1..131: mol_type = other DNA
aggaacccctagtgatggagttggccactccctctctgctcactcactcactcactgaggcctggggaccaaaggtccccagactgcagagctttgctctgcaggcctcagtgagtgagtgagtgagcaga

SEQ ID NO: 2920 - DNA, 20 bp, synthetic construct
  source 1..20: mol_type = other DNA
agaagatgggcgggagtctt

SEQ ID NO: 2921 - skipped

SEQ ID NO: 2922 - RNA, 19 nt, synthetic construct
  source 1..19: mol_type = other RNA
ctttatctcattactttga

SEQ ID NO: 2923 - RNA, 31 nt, synthetic construct
  source 1..31: mol_type = other RNA
aaaacgctttatctcattactttgacgtttt

SEQ ID NO: 2924 - DNA, 20 bp, synthetic construct
  source 1..20: mol_type = other DNA
agagcgtgatattaccctgt

SEQ ID NO: 2925 - DNA, 20 bp, synthetic construct
  source 1..20: mol_type = other DNA
ccctttgacgttggagtcca

SEQ ID NO: 2926 - DNA, 20 bp, synthetic construct
  source 1..20: mol_type = other DNA
tccccgatatgcaccaccgg

SEQ ID NO: 2927 - DNA, 20 bp, synthetic construct
  source 1..20: mol_type = other DNA
aagtggctgcgtaccacacc

SEQ ID NO: 2928 - DNA, 20 bp, synthetic construct
  source 1..20: mol_type = other DNA
gtacatccacaaacagacga

SEQ ID NO: 2929 - DNA, 20 bp, synthetic construct
  source 1..20: mol_type = other DNA
ccgatatgcaccaccgggta

SEQ ID NO: 2930 - DNA, 252 bp, synthetic construct
  source 1..252: mol_type = other DNA
aatggaggcggtactatgtagatgagaattcaggagcaaactgggaaaagcaactgcttccaaatatttgtgatttttacagtgtagttttggaaaaactcttagcctaccaattcttctaagtgttttaaaatgtgggagccagtacacatgaagttatagagtgttttaatgaggcttaaatatttaccgtaactatgaaatgctacgcatatcatgctgttcaggctccgtggccacgcaactcatact

SEQ ID NO: 2931 - DNA, 354 bp, synthetic construct
  source 1..354: mol_type = other DNA
ggatcctactgacgaggggcttgtccaaacaagcccgggcatgcctaaacatgccctgatgcaatcctgacgtcgtgaagcaatgattatgcaatttgagcatgtccagactagccctgacggatgacgcttgacgcaattcctgaggcaagtctgagcttgttcaaacttgtcttgaagaaattatgacggactgacgtatggtgcaatattggggcaatgcttgacgttcgcggtaggcgtgtacggtgggaggtctatataagcagagctcgtttagtgaaccgtcagatcgcctggagacgccatccacgctgttttgacctccatagaagtcaccgggaccgatccagc

SEQ ID NO: 2932 - DNA, 197 bp, synthetic construct
  source 1..197: mol_type = other DNA
tgcatctcaattagtcagcaaccatagtcccgcccctaactccgcccatcccgcccctaactccgcccagttccgcccattctccgccccatggctgactaattttttttatttatgcagaggccgaggccgcctcggcctctgagctattccagaagtagtgaggaggcttttttggaggcctaggcttttgcaaa

SEQ ID NO: 2933 - DNA, 178 bp, synthetic construct
  source 1..178: mol_type = other DNA
ctgacaaattcagtataaaagcttggggctggggccgagcactggggactttgagggtggccaggccagcgtaggaggccagcgtaggatcctgctgggagcggggaactgagggaagcgacgccgagaaagcaggcgtaccacggagggagagaaaagctccggaagcccagcagcg

SEQ ID NO: 2934 - DNA, 41 bp, synthetic construct
  source 1..41: mol_type = other DNA
ggggggctataaaagggggtgggggcgttcgtcctcactct

SEQ ID NO: 2935 - DNA, 212 bp, synthetic construct
  source 1..212: mol_type = other DNA
gggcagagcgcacatcgcccacagtccccgagaagttggggggaggggtcggcaattgatccggtgcctagagaaggtggcgcggggtaaactgggaaagtgatgtcgtgtactggctccgcctttttcccgagggtgggggagaaccgtatataagtgcagtagtcgccgtgaacgttctttttcgcaacgggtttgccgccagaacacag

SEQ ID NO: 2936 - DNA, 223 bp, synthetic construct
  source 1..223: mol_type = other DNA
acagcgctgaccgcggaggtccaaccggaagaatgtccggattggacattcggaagagggcccgccttccctggggaatctctgcgcacgcgcagaacgcttcgaccaatgaaaacacaggaagccgtccgcgcaaccgcgttgcgtcacttctgccgcccctgtttcaagggataagaaaccctgcgacaaaacctcctccttttccaagcggctgccgaag

SEQ ID NO: 2937 - DNA, 2370 bp, synthetic construct; identical to SEQ ID NO: 775
  source 1..2370: mol_type = other DNA

SEQ ID NO: 2938 - DNA, 2370 bp, synthetic construct; identical to SEQ ID NO: 776
  source 1..2370: mol_type = other DNA

SEQ ID NO: 2939 - DNA, 2370 bp, synthetic construct; identical to SEQ ID NO: 777
  source 1..2370: mol_type = other DNA

SEQ ID NO: 2940 - DNA, 2370 bp, synthetic construct; identical to SEQ ID NO: 778
  source 1..2370: mol_type = other DNA

SEQ ID NO: 2941 - DNA, 2370 bp, synthetic construct; identical to SEQ ID NO: 779
  source 1..2370: mol_type = other DNA

SEQ ID NO: 2942 - DNA, 2370 bp, synthetic construct; identical to SEQ ID NO: 780
  source 1..2370: mol_type = other DNA

SEQ ID NO: 2943 - DNA, 2370 bp, synthetic construct; identical to SEQ ID NO: 781
  source 1..2370: mol_type = other DNA

SEQ ID NO: 2944 - DNA, 2370 bp, synthetic construct; identical to SEQ ID NO: 782
  source 1..2370: mol_type = other DNA

SEQ ID NO: 2945 - DNA, 2370 bp, synthetic construct; identical to SEQ ID NO: 783
  source 1..2370: mol_type = other DNA

SEQ ID NO: 2946 - DNA, 2370 bp, synthetic construct; identical to SEQ ID NO: 784
  source 1..2370: mol_type = other DNA

SEQ ID NO: 2947 - DNA, 2370 bp, synthetic construct; identical to SEQ ID NO: 785
  source 1..2370: mol_type = other DNA

SEQ ID NO: 2948 - DNA, 2370 bp, synthetic construct; identical to SEQ ID NO: 786
  source 1..2370: mol_type = other DNA

SEQ ID NO: 2949 - DNA, 2525 bp, synthetic construct; identical to SEQ ID NO: 797
  source 1..2525: mol_type = other DNA

SEQ ID NO: 2950 - DNA, 2215 bp, synthetic construct; identical to SEQ ID NO: 787
  source 1..2215: mol_type = other DNA

SEQ ID NO: 2951 - DNA, 499 bp, synthetic construct
  source 1..499: mol_type = other DNA
ccccgtcacctttggcttatcagtgaagactaccatgtgagggcctatttcccatgattccttcatatttgcatatacgatacaaggctgttagagagataattggaattaatttgactgtaaacacaaagatattagtacaaaatacgtgacgtagaaagtaataatttcttgggtagtttgcagttttaaaattatgttttaaaatggactatcatatgcttaccgtaacttgaaagtatttcgatttcttggctttatatatcttgtggaaaggacgaaacaccgcctaggcaacagaaggctaaagaaggtatattgctgttgacagtgagcgacgtacctgatcatcaattaactgtgaagccacagatgggttaattgatgatcaggtacgctgcctactgcctcggacttcaaggggctactttaggagcaattatctttttttcctaggaaaccttcgagggtcttcagtgacatctggacgctaagaccg

SEQ ID NO: 2952 - DNA, 499 bp, synthetic construct
  source 1..499: mol_type = other DNA
ccccgtcacctttggcttatcagtgaagactaccatgtgagggcctatttcccatgattccttcatatttgcatatacgatacaaggctgttagagagataattggaattaatttgactgtaaacacaaagatattagtacaaaatacgtgacgtagaaagtaataatttcttgggtagtttgcagttttaaaattatgttttaaaatggactatcatatgcttaccgtaacttgaaagtatttcgatttcttggctttatatatcttgtggaaaggacgaaacaccgcctaggcaacagaaggctaaagaaggtatattgctgttgacagtgagcgacgtacctgatcatcaattaactgtgaagccacagatgggtagaggatactaggtaatggctgcctactgcctcggacttcaaggggctactttaggagcaattatctttttttcctaggaaaccttcgagggtcttcagtgacatctggacgctaagaccg

SEQ ID NO: 2953 - DNA, 502 bp, synthetic construct
  source 1..502: mol_type = other DNA
ccccgtcacctttggcttatcagtgaagactaccatgtgagggcctatttcccatgattccttcatatttgcatatacgatacaaggctgttagagagataattggaattaatttgactgtaaacacaaagatattagtacaaaatacgtgacgtagaaagtaataatttcttgggtagtttgcagttttaaaattatgttttaaaatggactatcatatgcttaccgtaacttgaaagtatttcgatttcttggctttatatatcttgtggaaaggacgaaacaccgcctaggcaacagaaggctcgagaaggtatattgctgttgacagtgagcgtcctgtacctgatcatcaattatagtgaagccacagatgtataattgatgatcaggtacaggttgcctactgcctcggacttcaagggggctactttaggagcaattatctttttttcctaggaaaccttcgagggtcttcagtgacatctggacgctaagaccg

SEQ ID NO: 2954 - DNA, 502 bp, synthetic construct
  source 1..502: mol_type = other DNA
ccccgtcacctttggcttatcagtgaagactaccatgtgagggcctatttcccatgattccttcatatttgcatatacgatacaaggctgttagagagataattggaattaatttgactgtaaacacaaagatattagtacaaaatacgtgacgtagaaagtaataatttcttgggtagtttgcagttttaaaattatgttttaaaatggactatcatatgcttaccgtaacttgaaagtatttcgatttcttggctttatatatcttgtggaaaggacgaaacaccgcctaggcaacagaaggctcgagaaggtatattgctgttgacagtgagcgtagacattacctagtatcctcttagtgaagccacagatgtaagaggatactaggtaatgtctttgcctactgcctcggacttcaagggggctactttaggagcaattatctttttttcctaggaaaccttcgagggtcttcagtgacatctggacgctaagaccg

SEQ ID NO: 2955 - DNA, 503 bp, synthetic construct
  source 1..503: mol_type = other DNA
ccccgtcacctttggcttatcagtgaagactaccatgtgagggcctatttcccatgattccttcatatttgcatatacgatacaaggctgttagagagataattggaattaatttgactgtaaacacaaagatattagtacaaaatacgtgacgtagaaagtaataatttcttgggtagtttgcagttttaaaattatgttttaaaatggactatcatatgcttaccgtaacttgaaagtatttcgatttcttggctttatatatcttgtggaaaggacgaaacaccgcctaggcaacagaatgctaaagaaggtatattgctgttgacagtgagcgactaattgatgatcaggtacaggtctgtgaagccacagatgggtcctgtaccatcatcaattagctgcctactgcctcggacttcaaggggctactttaggagcaattatctttttttcctaggaaaccttcgagggtcttcagtgacatctggacgctaagaccg

SEQ ID NO: 2956 - DNA, 503 bp, synthetic construct
  source 1..503: mol_type = other DNA
ccccgtcacctttggcttatcagtgaagactaccatgtgagggcctatttcccatgattccttcatatttgcatatacgatacaaggctgttagagagataattggaattaatttgactgtaaacacaaagatattagtacaaaatacgtgacgtagaaagtaataatttcttgggtagtttgcagttttaaaattatgttttaaaatggactatcatatgcttaccgtaacttgaaagtatttcgatttcttggctttatatatcttgtggaaaggacgaaacaccgcctaggcaacagaatgctaaagaaggtatattgctgttgacagtgagcgacagaggatactaggtaatgtcttctgtgaagccacagatgggtagacattatagtatcctctgctgcctactgcctcggacttcaaggggctactttaggagcaattatctttttttcctaggaaaccttcgagggtcttcagtgacatctggacgctaagaccg

SEQ ID NO: 2957 - DNA, 501 bp, synthetic construct
  source 1..501: mol_type = other DNA
ccccgtcacctttggcttatcagtgaagactaccatgtgagggcctatttcccatgattccttcatatttgcatatacgatacaaggctgttagagagataattggaattaatttgactgtaaacacaaagatattagtacaaaatacgtgacgtagaaagtaataatttcttgggtagtttgcagttttaaaattatgttttaaaatggactatcatatgcttaccgtaacttgaaagtatttcgatttcttggctttatatatcttgtggaaaggacgaaacaccgcctaggcaacagaaggctcgagaaggtatattgctgttgacagtgagcgtcctgtacctgatcatcaattatagtgaagccacagatgtataattgatgatcaggtacaggttgcctactgcctcggaattcaaggggctactttaggagcaattatctttttttcctaggaaaccttcgagggtcttcagtgacatctggacgctaagaccg

SEQ ID NO: 2958 - DNA, 501 bp, synthetic construct
  source 1..501: mol_type = other DNA
ccccgtcacctttggcttatcagtgaagactaccatgtgagggcctatttcccatgattccttcatatttgcatatacgatacaaggctgttagagagataattggaattaatttgactgtaaacacaaagatattagtacaaaatacgtgacgtagaaagtaataatttcttgggtagtttgcagttttaaaattatgttttaaaatggactatcatatgcttaccgtaacttgaaagtatttcgatttcttggctttatatatcttgtggaaaggacgaaacaccgcctaggcaacagaaggctcgagaaggtatattgctgttgacagtgagcgtagacattacctagtatcctcttagtgaagccacagatgtaagaggatactaggtaatgtctttgcctactgcctcggaattcaaggggctactttaggagcaattatctttttttcctaggaaaccttcgagggtcttcagtgacatctggacgctaagaccg

SEQ ID NO: 2959 - DNA, 973 bp, synthetic construct
  source 1..973: mol_type = other DNA
ccccgtcacctttggcttatcagtgaagactaccatgtgagggcctatttcccatgattccttcatatttgcatatacgatacaaggctgttagagagataattggaattaatttgactgtaaacacaaagatattagtacaaaatacgtgacgtagaaagtaataatttcttgggtagtttgcagttttaaaattatgttttaaaatggactatcatatgcttaccgtaacttgaaagtatttcgatttcttggctttatatatcttgtggaaaggacgaaacaccgcctaggcaacagaaggctaaagaaggtatattgctgttgacagtgagcgacgtacctgatcatcaattaactgtgaagccacagatgggttaattgatgatcaggtacgctgcctactgcctcggacttcaaggggctactttaggagcaattatctttttttcctaggaaaccttcgagggtcttcagtgacatctggacgctaagaccggctcaggatgcacaggcacaggacagcaagactctcgaggcgttctgcagtatttagcatgccccacccatctgcaaggcattctggatagtgtcaaaacagccggaaatcaagtccgtttatctcaaactttagcattttgggaataaatgatatttgctatgctggttaaattagattttagttaaatttcctgctgaagctctagtacgataagcaacttgacctaagtgtaaagttgagacttccttcaggtttatatagcttgtgcgccgcttgggtacctcgcctaggcaacagaaggctcgagaaggtatattgctgttgacagtgagcgtcctgtacctgatcatcaattatagtgaagccacagatgtataattgatgatcaggtacaggttgcctactgcctcggacttcaagggggctactttaggagcaattatctttttttgtgcgttattgcgctgctta

SEQ ID NO: 2960 - DNA, 953 bp, synthetic construct
  source 1..953: mol_type = other DNA
ccccgtcacctttggcttatcagtgaagactaccatgtgagggcctatttcccatgattccttcatatttgcatatacgatacaaggctgttagagagataattggaattaatttgactgtaaacacaaagatattagtacaaaatacgtgacgtagaaagtaataatttcttgggtagtttgcagttttaaaattatgttttaaaatggactatcatatgcttaccgtaacttgaaagtatttcgatttcttggctttatatatcttgtggaaaggacgaaacaccgcctaggcaacagaaggctaaagaaggtatattgctgttgacagtgagcgacgtacctgatcatcaattaactgtgaagccacagatgggttaattgatgatcaggtacgctgcctactgcctcggacttcaaggggctactttaggagcaattatctttttttcctaggaaaccttcgagggtcttcagtgacatctggacgctaagaccggaacatgggctgggggcctcgaacgctgacgtcatcaacccgctccaaggaatcgcgggcccagtgtcactaggcgggaacacccagcgcgcgtgcgccctggcaggaagatggctgtgagggacaggggagtggcgccctgcaatatttgcatgtcgctatgtgttctgggaaatcaccataaacgtgaaatgtctttggatttgggaatcttataagttctgtatgagaccactctttcccgctaggcaacagaaggctcgagaaggtatattgctgttgacagtgagcgtcctgtacctgatcatcaattatagtgaagccacagatgtataattgatgatcaggtacaggttgcctactgcctcggacttcaagggggctactttaggagcaattatcttttttttcaccctaaacggctcttcattgtatagtgccggaagagctataa

SEQ ID NO: 2961 - DNA, 974 bp, synthetic construct
  source 1..974: mol_type = other DNA
ccccgtcacctttggcttatcagtgaagactaccatgtgagggcctatttcccatgattccttcatatttgcatatacgatacaaggctgttagagagataattggaattaatttgactgtaaacacaaagatattagtacaaaatacgtgacgtagaaagtaataatttcttgggtagtttgcagttttaaaattatgttttaaaatggactatcatatgcttaccgtaacttgaaagtatttcgatttcttggctttatatatcttgtggaaaggacgaaacaccgcctaggcaacagaaggctaaagaaggtatattgctgttgacagtgagcgacgtacctgatcatcaattaactgtgaagccacagatgggttaattgatgatcaggtacgctgcctactgcctcggacttcaaggggctactttaggagcaattatctttttttcctaggaaaccttcgagggtcttcagtgacatctggacgctaagaccggctcaggatgcacaggcacaggacagcaagactctcgaggcgttctgcagtatttagcatgccccacccatctgcaaggcattctggatagtgtcaaaacagccggaaatcaagtccgtttatctcaaactttagcattttgggaataaatgatatttgctatgctggttaaattagattttagttaaatttcctgctgaagctctagtacgataagcaacttgacctaagtgtaaagttgagacttccttcaggtttatatagcttgtgcgccgcttgggtacctcgcctaggcaacagaatgctaaagaaggtatattgctgttgacagtgagcgactaattgatgatcaggtacaggtctgtgaagccacagatgggtcctgtaccatcatcaattagctgcctactgcctcggacttcaaggggctactttaggagcaattatctttttttgtgcgttattgcgctgctta

SEQ ID NO: 2962 - DNA, 954 bp, synthetic construct
  source 1..954: mol_type = other DNA
ccccgtcacctttggcttatcagtgaagactaccatgtgagggcctatttcccatgattccttcatatttgcatatacgatacaaggctgttagagagataattggaattaatttgactgtaaacacaaagatattagtacaaaatacgtgacgtagaaagtaataatttcttgggtagtttgcagttttaaaattatgttttaaaatggactatcatatgcttaccgtaacttgaaagtatttcgatttcttggctttatatatcttgtggaaaggacgaaacaccgcctaggcaacagaaggctaaagaaggtatattgctgttgacagtgagcgacgtacctgatcatcaattaactgtgaagccacagatgggttaattgatgatcaggtacgctgcctactgcctcggacttcaaggggctactttaggagcaattatctttttttcctaggaaaccttcgagggtcttcagtgacatctggacgctaagaccggaacatgggctgggggcctcgaacgctgacgtcatcaacccgctccaaggaatcgcgggcccagtgtcactaggcgggaacacccagcgcgcgtgcgccctggcaggaagatggctgtgagggacaggggagtggcgccctgcaatatttgcatgtcgctatgtgttctgggaaatcaccataaacgtgaaatgtctttggatttgggaatcttataagttctgtatgagaccactctttcccgcctaggcaacagaatgctaaagaaggtatattgctgttgacagtgagcgactaattgatgatcaggtacaggtctgtgaagccacagatgggtcctgtaccatcatcaattagctgcctactgcctcggacttcaaggggctactttaggagcaattatctttttttcaccctaaacggctcttcattgtatagtgccggaagagctataa

SEQ ID NO: 2963 - DNA, 1428 bp, synthetic construct
  source 1..1428: mol_type = other DNA
ccccgtcacctttggcttatcagtgaagactaccatgtgagggcctatttcccatgattccttcatatttgcatatacgatacaaggctgttagagagataattggaattaatttgactgtaaacacaaagatattagtacaaaatacgtgacgtagaaagtaataatttcttgggtagtttgcagttttaaaattatgttttaaaatggactatcatatgcttaccgtaacttgaaagtatttcgatttcttggctttatatatcttgtggaaaggacgaaacaccgcctaggcaacagaaggctaaagaaggtatattgctgttgacagtgagcgacgtacctgatcatcaattaactgtgaagccacagatgggttaattgatgatcaggtacgctgcctactgcctcggacttcaaggggctactttaggagcaattatctttttttcctaggaaaccttcgagggtcttcagtgacatctggacgctaagaccggctcaggatgcacaggcacaggacagcaagactctcgaggcgttctgcagtatttagcatgccccacccatctgcaaggcattctggatagtgtcaaaacagccggaaatcaagtccgtttatctcaaactttagcattttgggaataaatgatatttgctatgctggttaaattagattttagttaaatttcctgctgaagctctagtacgataagcaacttgacctaagtgtaaagttgagacttccttcaggtttatatagcttgtgcgccgcttgggtacctcgcctaggcaacagaaggctcgagaaggtatattgctgttgacagtgagcgtcctgtacctgatcatcaattatagtgaagccacagatgtataattgatgatcaggtacaggttgcctactgcctcggacttcaagggggctactttaggagcaattatctttttttgtgcgttattgcgctgcttagaacatgggctgggggcctcgaacgctgacgtcatcaacccgctccaaggaatcgcgggcccagtgtcactaggcgggaacacccagcgcgcgtgcgccctggcaggaagatggctgtgagggacaggggagtggcgccctgcaatatttgcatgtcgctatgtgttctgggaaatcaccataaacgtgaaatgtctttggatttgggaatcttataagttctgtatgagaccactctttcccgcctaggcaacagaatgctaaagaaggtatattgctgttgacagtgagcgactaattgatgatcaggtacaggtctgtgaagccacagatgggtcctgtaccatcatcaattagctgcctactgcctcggacttcaaggggctactttaggagcaattatctttttttcaccctaaacggctcttcattgtatagtgccggaagagctataa

SEQ ID NO: 2964 - DNA, 1428 bp, synthetic construct
  source 1..1428: mol_type = other DNA
ccccgtcacctttggcttatcagtgaagactaccatgtgagggcctatttcccatgattccttcatatttgcatatacgatacaaggctgttagagagataattggaattaatttgactgtaaacacaaagatattagtacaaaatacgtgacgtagaaagtaataatttcttgggtagtttgcagttttaaaattatgttttaaaatggactatcatatgcttaccgtaacttgaaagtatttcgatttcttggctttatatatcttgtggaaaggacgaaacaccgcctaggcaacagaaggctaaagaaggtatattgctgttgacagtgagcgacgtacctgatcatcaattaactgtgaagccacagatgggttaattgatgatcaggtacgctgcctactgcctcggacttcaaggggctactttaggagcaattatctttttttcctaggaaaccttcgagggtcttcagtgacatctggacgctaagaccggctcaggatgcacaggcacaggacagcaagactctcgaggcgttctgcagtatttagcatgccccacccatctgcaaggcattctggatagtgtcaaaacagccggaaatcaagtccgtttatctcaaactttagcattttgggaataaatgatatttgctatgctggttaaattagattttagttaaatttcctgctgaagctctagtacgataagcaacttgacctaagtgtaaagttgagacttccttcaggtttatatagcttgtgcgccgcttgggtacctcgcctaggcaacagaatgctaaagaaggtatattgctgttgacagtgagcgactaattgatgatcaggtacaggtctgtgaagccacagatgggtcctgtaccatcatcaattagctgcctactgcctcggacttcaaggggctactttaggagcaattatctttttttgtgcgttattgcgctgcttagaacatgggctgggggcctcgaacgctgacgtcatcaacccgctccaaggaatcgcgggcccagtgtcactaggcgggaacacccagcgcgcgtgcgccctggcaggaagatggctgtgagggacaggggagtggcgccctgcaatatttgcatgtcgctatgtgttctgggaaatcaccataaacgtgaaatgtctttggatttgggaatcttataagttctgtatgagaccactctttcccgctaggcaacagaaggctcgagaaggtatattgctgttgacagtgagcgtcctgtacctgatcatcaattatagtgaagccacagatgtataattgatgatcaggtacaggttgcctactgcctcggacttcaagggggctactttaggagcaattatcttttttttcaccctaaacggctcttcattgtatagtgccggaagagctataa

SEQ ID NO: 2965 - DNA, 580 bp, synthetic construct
  source 1..580: mol_type = other DNA
ccccgtcacctttggcttatcagtgaagactaccatggtgcaatatctacgtgtgccgccggccccctcgcacagacttgtgggagaagctcggctactcccctgccccggttaatttgcatataatatttcctagtaactatagaggcttaatgtgcgataaaagacagataatctgttctttttaatactagctacattttacatgataggcttggatttctataagagatacaaatactaaattattattttaaaaaacagcacaaaaggaaactcaccctaactgtaaagtaattgtgtgttttgagactataaatatcccttggagaaaagccttgtttgtcttcgagaagacctgcctaggcaacagaaggctaaagaaggtatattgctgttgacagtgagcgacgtacctgatcatcaattaactgtgaagccacagatgggttaattgatgatcaggtacgctgcctactgcctcggacttcaaggggctactttaggagcaattatctttttttcaaaccatgattggtcgctatcgagggtcttcagtgacatctggacgctaagaccg

SEQ ID NO: 2966 - DNA, 1054 bp, synthetic construct
  source 1..1054: mol_type = other DNA
ccccgtcacctttggcttatcagtgaagactaccatggtgcaatatctacgtgtgccgccggccccctcgcacagacttgtgggagaagctcggctactcccctgccccggttaatttgcatataatatttcctagtaactatagaggcttaatgtgcgataaaagacagataatctgttctttttaatactagctacattttacatgataggcttggatttctataagagatacaaatactaaattattattttaaaaaacagcacaaaaggaaactcaccctaactgtaaagtaattgtgtgttttgagactataaatatcccttggagaaaagccttgtttgtcttcgagaagacctgcctaggcaacagaaggctaaagaaggtatattgctgttgacagtgagcgacgtacctgatcatcaattaactgtgaagccacagatgggttaattgatgatcaggtacgctgcctactgcctcggacttcaaggggctactttaggagcaattatctttttttcaaaccatgattggtcgctagctcaggatgcacaggcacaggacagcaagactctcgaggcgttctgcagtatttagcatgccccacccatctgcaaggcattctggatagtgtcaaaacagccggaaatcaagtccgtttatctcaaactttagcattttgggaataaatgatatttgctatgctggttaaattagattttagttaaatttcctgctgaagctctagtacgataagcaacttgacctaagtgtaaagttgagacttccttcaggtttatatagcttgtgcgccgcttgggtacctcgcctaggcaacagaaggctcgagaaggtatattgctgttgacagtgagcgtcctgtacctgatcatcaattatagtgaagccacagatgtataattgatgatcaggtacaggttgcctactgcctcggacttcaagggggctactttaggagcaattatctttttttgtgcgttattgcgctgcttatcgagggtcttcagtgacatctggacgctaagaccg

SEQ ID NO: 2967 - DNA, 1035 bp, synthetic construct
  source 1..1035: mol_type = other DNA
ccccgtcacctttggcttatcagtgaagactaccatggtgcaatatctacgtgtgccgccggccccctcgcacagacttgtgggagaagctcggctactcccctgccccggttaatttgcatataatatttcctagtaactatagaggcttaatgtgcgataaaagacagataatctgttctttttaatactagctacattttacatgataggcttggatttctataagagatacaaatactaaattattattttaaaaaacagcacaaaaggaaactcaccctaactgtaaagtaattgtgtgttttgagactataaatatcccttggagaaaagccttgtttgtcttcgagaagacctgcctaggcaacagaaggctaaagaaggtatattgctgttgacagtgagcgacgtacctgatcatcaattaactgtgaagccacagatgggttaattgatgatcaggtacgctgcctactgcctcggacttcaaggggctactttaggagcaattatctttttttcaaaccatgattggtcgctaggaacatgggctgggggcctcgaacgctgacgtcatcaacccgctccaaggaatcgcgggcccagtgtcactaggcgggaacacccagcgcgcgtgcgccctggcaggaagatggctgtgagggacaggggagtggcgccctgcaatatttgcatgtcgctatgtgttctgggaaatcaccataaacgtgaaatgtctttggatttgggaatcttataagttctgtatgagaccactctttcccgctaggcaacagaaggctcgagaaggtatattgctgttgacagtgagcgtcctgtacctgatcatcaattatagtgaagccacagatgtataattgatgatcaggtacaggttgcctactgcctcggacttcaagggggctactttaggagcaattatcttttttttcaccctaaacggctcttcattgtatagtgccggaagagctataatcgagggtcttcagtgacatctggacgctaagaccg

SEQ ID NO: 2968 - DNA, 1055 bp, synthetic construct
  source 1..1055: mol_type = other DNA
ccccgtcacctttggcttatcagtgaagactaccatggtgcaatatctacgtgtgccgccggccccctcgcacagacttgtgggagaagctcggctactcccctgccccggttaatttgcatataatatttcctagtaactatagaggcttaatgtgcgataaaagacagataatctgttctttttaatactagctacattttacatgataggcttggatttctataagagatacaaatactaaattattattttaaaaaacagcacaaaaggaaactcaccctaactgtaaagtaattgtgtgttttgagactataaatatcccttggagaaaagccttgtttgtcttcgagaagacctgcctaggcaacagaaggctaaagaaggtatattgctgttgacagtgagcgacgtacctgatcatcaattaactgtgaagccacagatgggttaattgatgatcaggtacgctgcctactgcctcggacttcaaggggctactttaggagcaattatctttttttcaaaccatgattggtcgctagctcaggatgcacaggcacaggacagcaagactctcgaggcgttctgcagtatttagcatgccccacccatctgcaaggcattctggatagtgtcaaaacagccggaaatcaagtccgtttatctcaaactttagcattttgggaataaatgatatttgctatgctggttaaattagattttagttaaatttcctgctgaagctctagtacgataagcaacttgacctaagtgtaaagttgagacttccttcaggtttatatagcttgtgcgccgcttgggtacctcgcctaggcaacagaatgctaaagaaggtatattgctgttgacagtgagcgactaattgatgatcaggtacaggtctgtgaagccacagatgggtcctgtaccatcatcaattagctgcctactgcctcggacttcaaggggctactttaggagcaattatctttttttgtgcgttattgcgctgcttatcgagggtcttcagtgacatctggacgctaagaccg

SEQ ID NO: 2969 - DNA, 1036 bp, synthetic construct
  source 1..1036: mol_type = other DNA
ccccgtcacctttggcttatcagtgaagactaccatggtgcaatatctacgtgtgccgccggccccctcgcacagacttgtgggagaagctcggctactcccctgccccggttaatttgcatataatatttcctagtaactatagaggcttaatgtgcgataaaagacagataatctgttctttttaatactagctacattttacatgataggcttggatttctataagagatacaaatactaaattattattttaaaaaacagcacaaaaggaaactcaccctaactgtaaagtaattgtgtgttttgagactataaatatcccttggagaaaagccttgtttgtcttcgagaagacctgcctaggcaacagaaggctaaagaaggtatattgctgttgacagtgagcgacgtacctgatcatcaattaactgtgaagccacagatgggttaattgatgatcaggtacgctgcctactgcctcggacttcaaggggctactttaggagcaattatctttttttcaaaccatgattggtcgctaggaacatgggctgggggcctcgaacgctgacgtcatcaacccgctccaaggaatcgcgggcccagtgtcactaggcgggaacacccagcgcgcgtgcgccctggcaggaagatggctgtgagggacaggggagtggcgccctgcaatatttgcatgtcgctatgtgttctgggaaatcaccataaacgtgaaatgtctttggatttgggaatcttataagttctgtatgagaccactctttcccgcctaggcaacagaatgctaaagaaggtatattgctgttgacagtgagcgactaattgatgatcaggtacaggtctgtgaagccacagatgggtcctgtaccatcatcaattagctgcctactgcctcggacttcaaggggctactttaggagcaattatctttttttcaccctaaacggctcttcattgtatagtgccggaagagctataatcgagggtcttcagtgacatctggacgctaagaccg

SEQ ID NO: 2970 - DNA, 1509 bp, synthetic construct
  source 1..1509: mol_type = other DNA
ccccgtcacctttggcttatcagtgaagactaccatggtgcaatatctacgtgtgccgccggccccctcgcacagacttgtgggagaagctcggctactcccctgccccggttaatttgcatataatatttcctagtaactatagaggcttaatgtgcgataaaagacagataatctgttctttttaatactagctacattttacatgataggcttggatttctataagagatacaaatactaaattattattttaaaaaacagcacaaaaggaaactcaccctaactgtaaagtaattgtgtgttttgagactataaatatcccttggagaaaagccttgtttgtcttcgagaagacctgcctaggcaacagaaggctaaagaaggtatattgctgttgacagtgagcgacgtacctgatcatcaattaactgtgaagccacagatgggttaattgatgatcaggtacgctgcctactgcctcggacttcaaggggctactttaggagcaattatctttttttcaaaccatgattggtcgctagctcaggatgcacaggcacaggacagcaagactctcgaggcgttctgcagtatttagcatgccccacccatctgcaaggcattctggatagtgtcaaaacagccggaaatcaagtccgtttatctcaaactttagcattttgggaataaatgatatttgctatgctggttaaattagattttagttaaatttcctgctgaagctctagtacgataagcaacttgacctaagtgtaaagttgagacttccttcaggtttatatagcttgtgcgccgcttgggtacctcgcctaggcaacagaaggctcgagaaggtatattgctgttgacagtgagcgtcctgtacctgatcatcaattatagtgaagccacagatgtataattgatgatcaggtacaggttgcctactgcctcggacttcaagggggctactttaggagcaattatctttttttgtgcgttattgcgctgcttagaacatgggctgggggcctcgaacgctgacgtcatcaacccgctccaaggaatcgcgggcccagtgtcactaggcgggaacacccagcgcgcgtgcgccctggcaggaagatggctgtgagggacaggggagtggcgccctgcaatatttgcatgtcgctatgtgttctgggaaatcaccataaacgtgaaatgtctttggatttgggaatcttataagttctgtatgagaccactctttcccgcctaggcaacagaatgctaaagaaggtatattgctgttgacagtgagcgactaattgatgatcaggtacaggtctgtgaagccacagatgggtcctgtaccatcatcaattagctgcctactgcctcggacttcaaggggctactttaggagcaattatctttttttcaccctaaacggctcttcattgtatagtgccggaagagctataatcgagggtcttcagtgacatctggacgctaagaccg

SEQ ID NO: 2971 - DNA, 1509 bp, synthetic construct; identical to SEQ ID NO: 2970
  source 1..1509: mol_type = other DNA

SEQ ID NO: 2972 - DNA, 481 bp, synthetic construct
  source 1..481: mol_type = other DNA
ctttagctccggcaagcaatgagggcctatttcccatgattccttcatatttgcatatacgatacaaggctgttagagagataattggaattaatttgactgtaaacacaaagatattagtacaaaatacgtgacgtagaaagtaataatttcttgggtagtttgcagttttaaaattatgttttaaaatggactatcatatgcttaccgtaacttgaaagtatttcgatttcttggctttatatatcttgtggaaaggacgaaacaccgtggctctcaaagtaatcagataaaagcgccagtttttttaagaacagcgcaagcatcgtcgacgggtcctactcgtctctcaacctgctttgtcagttttttttcaattggagactaatgcggccggccattactcctctcgtgtcttgttgcaatgtctgctggtttgtttgatgttgtttgcgggcgggccctatagtgagtcgtatta

SEQ ID NO: 2973 - DNA, 343 bp, synthetic construct
  source 1..343: mol_type = other DNA
ctttagctccggcaagcaatgagggcctatttcccatgattccttcatatttgcatatacgatacaaggctgttagagagataattggaattaatttgactgtaaacacaaagatattagtacaaaatacgtgacgtagaaagtaataatttcttgggtagtttgcagttttaaaattatgttttaaaatggactatcatatgcttaccgtaacttgaaagtatttcgatttcttggctttatatatcttgtggaaaggacgaaacaccaaaccacaactagaatgcagctttgatgctccctccgaagagggagtttttttttaagaacagcgcaagcatcg

SEQ ID NO: 2974 - DNA, 403 bp, synthetic construct
  source 1..403: mol_type = other DNA
ctttagctccggcaagcaatgagggcctatttcccatgattccttcatatttgcatatacgatacaaggctgttagagagataattggaattaatttgactgtaaacacaaagatattagtacaaaatacgtgacgtagaaagtaataatttcttgggtagtttgcagttttaaaattatgttttaaaatggactatcatatgcttaccgtaacttgaaagtatttcgatttcttggctttatatatcttgtggaaaggacgaaacaccaaaccacaactagaatgcagctttgatgctccctccgaagagggagtgggctatctgcttgttagtctatcaagtctggctctcaaagtaatcagataaaagcgccagtttttttaagaacagcgcaagcatcg

SEQ ID NO: 2975 - DNA, 403 bp, synthetic construct; identical to SEQ ID NO: 2974
  source 1..403: mol_type = other DNA

SEQ ID NO: 2976 - DNA, 403 bp, synthetic construct
  source 1..403: mol_type = other DNA
tgttagttatggcctgcgagaaaaaaaagagacgaattcgtctcgctttgatgctccctccgaagagggagctttacccactacgacatagtcgctggtgatggctctcaaagtaatcagataaaagcgccagtggtgtttcgtcctttccacaagatatataaagccaagaaatcgaaatactttcaagttacggtaagcatatgatagtccattttaaaacataattttaaaactgcaaactacccaagaaattattactttctacgtcacgtattttgtactaatatctttgtgtttacagtcaaattaattccaattatctctctaacagccttgtatcgtatatgcaaatatgaaggaatcatgggaaataggccctcgattcaaaaaggtgagcgaa

SEQ ID NO: 2977 - DNA, 385 bp, synthetic construct
  source 1..385: mol_type = other DNA
tgttagttatggcctgcgagaaaaaaactttgatgctccctccgaagagggagctttacccactacgacatagtcgctggtgatggctctcaaagtaatcagataaaagcgccagtggtgtttcgtcctttccacaagatatataaagccaagaaatcgaaatactttcaagttacggtaagcatatgatagtccattttaaaacataattttaaaactgcaaactacccaagaaattattactttctacgtcacgtattttgtactaatatctttgtgtttacagtcaaattaattccaattatctctctaacagccttgtatcgtatatgcaaatatgaaggaatcatgggaaataggccctcgattcaaaaaggtgagcgaa

SEQ ID NO: 2978 - DNA, 412 bp, synthetic construct
  source 1..412: mol_type = other DNA
tgttagttatggcctgcgagaaaaaaaagagacgaattcgtctcgctctgatgctccttacggaccgaagtccgtaaggcgctttacccatacgacatagtcgctggtgatggcgctcagagtaatcagatagaagcgccagtggtgtttcgtcctttccacaagatatataaagccaagaaatcgaaatactttcaagttacggtaagcatatgatagtccattttaaaacataattttaaaactgcaaactacccaagaaattattactttctacgtcacgtattttgtactaatatctttgtgtttacagtcaaattaattccaattatctctctaacagccttgtatcgtatatgcaaatatgaaggaatcatgggaaataggccctcgattcaaaaaggtgagcgaa

SEQ ID NO: 2979 - DNA, 394 bp, synthetic construct
  source 1..394: mol_type = other DNA
tgttagttatggcctgcgagaaaaaaactctgatgctccttacggaccgaagtccgtaaggcgctttacccatacgacatagtcgctggtgatggcgctcagagtaatcagatagaagcgccagtggtgtttcgtcctttccacaagatatataaagccaagaaatcgaaatactttcaagttacggtaagcatatgatagtccattttaaaacataattttaaaactgcaaactacccaagaaattattactttctacgtcacgtattttgtactaatatctttgtgtttacagtcaaattaattccaattatctctctaacagccttgtatcgtatatgcaaatatgaaggaatcatgggaaataggccctcgattcaaaaaggtgagcgaa

SEQ ID NO: 2980 - DNA, 413 bp, synthetic construct
  source 1..413: mol_type = other DNA
tgttagttatggcctgcgagaaaaaaaagagacgaattcgtctcgctctgatgcctcttacggaccgaagtccgtaagcggctttacccactacgacatagtcgctggtgatggcgctcagagtaatcagatagaagcgccagtggtgtttcgtcctttccacaagatatataaagccaagaaatcgaaatactttcaagttacggtaagcatatgatagtccattttaaaacataattttaaaactgcaaactacccaagaaattattactttctacgtcacgtattttgtactaatatctttgtgtttacagtcaaattaattccaattatctctctaacagccttgtatcgtatatgcaaatatgaaggaatcatgggaaataggccctcgattcaaaaaggtgagcgaa

SEQ ID NO: 2981 - DNA, 395 bp, synthetic construct
  source 1..395: mol_type = other DNA
tgttagttatggcctgcgagaaaaaaactctgatgcctcttacggaccgaagtccgtaagcggctttacccactacgacatagtcgctggtgatggcgctcagagtaatcagatagaagcgccagtggtgtttcgtcctttccacaagatatataaagccaagaaatcgaaatactttcaagttacggtaagcatatgatagtccattttaaaacataattttaaaactgcaaactacccaagaaattattactttctacgtcacgtattttgtactaatatctttgtgtttacagtcaaattaattccaattatctctctaacagccttgtatcgtatatgcaaatatgaaggaatcatgggaaataggccctcgattcaaaaaggtgagcgaa

SEQ ID NO: 2982 - DNA, 15 bp, synthetic construct
  source 1..15: mol_type = other DNA
actaccggtgccacc

SEQ ID NO: 2983 - DNA, 24 bp, synthetic construct
  source 1..24: mol_type = other DNA
ttcaagaagatgggcgggagtctt

SEQ ID NO: 2984 - DNA, 24 bp, synthetic construct
  source 1..24: mol_type = other DNA
atcaagaagatgggcgggagtctt

SEQ ID NO: 2985 - DNA, 27 bp, synthetic construct
  source 1..27: mol_type = other DNA
ccagccgcgaagcgagtgaaactggac

SEQ ID NO: 2986 - DNA, 42 bp, synthetic construct
  source 1..42: mol_type = other DNA
ctctggctaactaccggtctcactgcattctagttgtggttt

SEQ ID NO: 2987 - DNA, 54 bp, synthetic construct
  source 1..54: mol_type = other DNA
gaattcctagagctcgctgatcagcctcgactcactgcattctagttgtggttt

SEQ ID NO: 2988 - DNA, 37 bp, synthetic construct
  source 1..37: mol_type = other DNA
ctctggctaactattcactgcattctagttgtggttt

SEQ ID NO: 2989 - DNA, 54 bp, synthetic construct
  source 1..54: mol_type = other DNA
gaattcctagagctcgctgatcagcctcgattcactgcattctagttgtggttt

SEQ ID NO: 2990 - DNA, 7120 bp, synthetic construct
  source 1..7120: mol_type = other DNA
gttggccgtctcaatctgctagcgtaacgccagggttttcccagtcacgacgttgtaaaacgacggccagtgagcgcgcgtaatacgactcactatagggcgaattgggtaccgggccccccctcgatcgaggtcgacggtatcgggggagctcgcagggtctccattttgaagcgggaggtttgaacgcgcagccgccatgccggggttttacgagattgtgattaaggtccccagcgaccttgacgagcatctgcccggcatttctgacagctttgtgaactgggtggccgagaaggaatgggagttgccgccagattctgacatggatctgaatctgattgagcaggcacccctgaccgtggccgagaagctgcagcgcgactttctgacggaatggcgccgtgtgagtaaggccccggaggctcttttctttgtgcaatttgagaagggagagagctacttccacatgcacgtgctcgtggaaaccaccggggtgaaatccatggttttgggacgtttcctgagtcagattcgcgaaaaactgattcagagaatttaccgcgggatcgagccgactttgccaaactggttcgcggtcacaaagaccagaaatggcgccggaggcgggaacaaggtggtggatgagtgctacatccccaattacttgctccccaaaacccagcctgagctccagtgggcgtggactaatatggaacagtatttaagcgcctgtttgaatctcacggagcgtaaacggttggtggcgcagcatctgacgcacgtgtcgcagacgcaggagcagaacaaagagaatcagaatcccaattctgatgcgccggtgatcagatcaaaaacttcagccaggtacatggagctggtcgggtggctcgtggacaaggggattacctcggagaagcagtggatccaggaggaccaggcctcatacatctccttcaatgcggcctccaactcgcggtcccaaatcaaggctgccttggacaatgcgggaaagattatgagcctgactaaaaccgcccccgactacctggtgggccagcagcccgtggaggacatttccagcaatcggatttataaaattttggaactaaacgggtacgatccccaatatgcggcttccgtctttctgggatgggccacgaaaaagttcggcaagaggaacaccatctggctgtttgggcctgcaactaccgggaagaccaacatcgcggaggccatagcccacactgtgcccttctacgggtgcgtaaactggaccaatgagaactttcccttcaacgactgtgtcgacaagatggtgatctggtgggaggaggggaagatgaccgccaaggtcgtggagtcggccaaagccattctcggaggaagcaaggtgcgcgtggaccagaaatgcaagtcctcggcccagatagacccgactcccgtgatcgtcacctccaacaccaacatgtgcgccgtgattgacgggaactcaacgaccttcgaacaccagcagccgttgcaagaccggatgttcaaatttgaactcacccgccgtctggatcatgactttgggaaggtcaccaagcaggaagtcaaagactttttccggtgggcaaaggatcacgtggttgaggtggagcatgaattctacgtcaaaaagggtggagccaagaaaagacccgcccccagtgacgcagatataagtgagcccaaacgggtgcgcgagtcagttgcgcagccatcgacgtcagacgcggaagcttcgatcaactacgcagacaggtaccaaaacaaatgttctcgtcacgtgggcatgaatctgatgctgtttccctgcagacaatgcgagagaatgaatcagaattcaaatatctgcttcactcacggacagaaagactgtttagagtgctttcccgtgtcagaatctcaacccgtttctgtcgtcaaaaaggcgtatcagaaactgtgctacattcatcatatcatgggaaaggtgccagacgcttgcactgcctgcgatctggtcaatgtggatttggatgactgcatctttgaacaataaatgatttaaatcaggtatggctgccgatggttatcttccagattggctcgaggacaaccttagtgaaggaattcgcgagtggtgggctttgaaacctggagcccctcaacccaaggcaaatcaacaacatcaagacaacgctcgaggtcttgtgcttccgggttacaaataccttggacccggcaacggactcgacaagggggagccggtcaacgcagcagacgcggcggccctcgagcacgacaaggcctacgaccagcagctcaaggccggagacaacccgtacctcaagtacaaccacgccgacgccgagttccaggagcggctcaaagaagatacgtcttttgggggcaacctcgggcgagcagtcttccaggccaaaaagaggcttcttgaacctcttggtctggttgaggaagcggctaagacggctcctggaaagaagaggcctgtagagcagtctcctcaggaaccggactcctccgcgggtattggcaaatcgggtgcacagcccgctaaaaagagactcaatttcggtcagactggcgacacagagtcagtcccagaccctcaaccaatcggagaacctcccgcagccccctcaggtgtgggatctcttacaatggcttcaggtggtggcgcaccagtggcagacaataacgaaggtgccgatggagtgggtagttcctcgggaaattggcattgcgattcccaatggctgggggacagagtcatcaccaccagcacccgaacctgggccctgcccacctacaacaatcacctctacaagcaaatctccaacagcacatctggaggatcttcaaatgacaacgcctacttcggctacagcaccccctgggggtattttgacttcaacagattccactgccacttctcaccacgtgactggcagcgactcatcaacaacaactggggattccggcctaagcgactcaacttcaagctcttcaacattcaggtcaaagaggttacggacaacaatggagtcaagaccatcgccaataaccttaccagcacggtccaggtcttcacggactcagactatcagctcccgtacgtgctcgggtcggctcacgagggctgcctcccgccgttcccagcggacgttttcatgattcctcagtacgggtatctgacgcttaatgatggaagccaggccgtgggtcgttcgtccttttactgcctggaatatttcccgtcgcaaatgctaagaacgggtaacaacttccagttcagctacgagtttgagaacgtacctttccatagcagctacgctcacagccaaagcctggaccgactaatgaatccactcatcgaccaatacttgtactatctctcaaagactattaacggttctggacagaatcaacaaacgctaaaattcagtgtggccggacccagcaacatggctgtccagggaagaaactacatacctggacccagctaccgacaacaacgtgtctcaaccactgtgactcaaaacaacaacagcgaatttgcttggcctggagcttcttcttgggctctcaatggacgtaatagcttgatgaatcctggacctgctatggccagccacaaagaaggagaggaccgtttctttcctttgtctggatctttaatttttggcaaacaaggaactggaagagacaacgtggatgcggacaaagtcatgataaccaacgaagaagaaattaaaactactaacccggtagcaacggagtcctatggacaagtggccacaaaccaccagagtgcccaagcacaggcgcagaccggctgggttcaaaaccaaggaatacttccgggtatggtttggcaggacagagatgtgtacctgcaaggacccatttgggccaaaattcctcacacggacggcaactttcacccttctccgctgatgggagggtttggaatgaagcacccgcctcctcagatcctcatcaaaaacacacctgtacctgcggatcctccaacggccttcaacaaggacaagctgaactctttcatcacccagtattctactggccaagtcagcgtggagatcgagtgggagctgcagaaggaaaacagcaagcgctggaacccggagatccagtacacttccaactattacaagtctaataatgttgaatttgctgttaatactgaaggtgtatatagtgaaccccgccccattggcaccagatacctgactcgtaatctgtaattgcttgttaatcaataaaccgtttaattcgtttcagttgaactttggtctctgcgaagggcgaattcgtttaaacctgcaggactagaggtcctgtattagaggtcacgtgagtgttttgcgacattttgcgacaccatgtggtcacgctgggtatttaagcccgagtgagcacgcagggtctccattttgaagcgggaggtttgaacgcgcagccgccaagccgaattctgcagatatccatcacactggcggccgctcgactagagcggccgccaccgcggtggagctccagcttttgttccctttagtgagggttaattgcgcgcttggcgtaatcatggtcatagctgtttcctgtgtgaaattgttatccgctcacaattccacacaacatacgagccggaagcataaagtgtaaagcctggggtgcctaatgagtgagctaactcacattaattgcgttgcgctcactgcccgctttccagtcgggaaacctgtcgtgccagctgcattaatgaatcggccaacgcgcggggagaggcggtttgcgtattgggcgctcttccgcttcctcgctcactgactcgctgcggaaccgtaaaaaggtctagataggtgagacgtccgcaggctaggtggaggctcagtgatgataagtctgcgatggtggatgcatgtgtcatggtcatagctgtttcctgtgtgaaattgttatccgctcagagggcacaatcctattccgcgctatccgacaatctccaagacattaggtggagttcagttcggcgtatggcataacgtcaggtggcacttttcggggaaatgtgtatgtcgctggaaagaacatgtgagcaaaaggccagcaaaaggccaggaaccgtaaaaaggccgcgttgctggcgtttttccataggctccgcccccctgacgagcatcacaaaaatcgacgctcaagtcagaggtggcgaaacccgacaggactataaagataccaggcgtttccccctggaagctccctcgtgcgctctcctgttccgaccctgccgcttaccggatacctgtccgcctttctcccttcgggaagcgtggcgctttctcatagctcacgctgtaggtatctcagttcggtgtaggtcgttcgctccaagctgggctgtgtgcacgaaccccccgttcagcccgaccgctgcgccttatccggtaactatcgtcttgagtccaacccggtaagacacgacttatcgccactggcagcagccactggtaacaggattagcagagcgaggtatgtaggcggtgctacagagttcttgaagtggtggcctaactacggctacactagaagaacagtatttggtatctgcgctctgctgaagccagttaccttcggaaaaagagttggtagctcttgatccggcaaacaaaccaccgctggtagcggtggtttttttgtttgcaagcagcagattacgcgcagaaaaaaaggatctcaagaagatcctttgatcttttctacggggtctgacgctctattcaacaaagccgccgtcccgtcaagtcagcgtaaatgggtagggggcttcaaatcgtccgctctgccagtgttacaaccaattaacaaattctgattagaaaaactcatcgagcatcaaatgaaactgcaatttattcatatcaggattatcaataccatatttttgaaaaagccgtttctgtaatgaaggagaaaactcaccgaggcagttccataggatggcaagatcctggtatcggtctgcgattccgactcgtccaacatcaatacaacctattaatttcccctcgtcaaaaataaggttatcaagtgagaaatcaccatgagtgacgactgaatccggtgagaatggcaaaagcttatgcatttctttccagacttgttcaacaggccagccattacgctcgtcatcaaaatcactcgcatcaaccaaaccgttattcattcgtgattgcgcctgagcgagacgaaatacgcgatcgctgttaaaaggacaattacaaacaggaatcgaatgcaaccggcgcaggaacactgccagcgcatcaacaatattttcacctgaatcaggatattcttctaatacctggaatgctgttttcccggggatcgcagtggtgagtaaccatgcatcatcaggagtacggataaaatgcttgatggtcggaagaggcataaattccgtcagccagtttagtctgaccatctcatctgtaacatcattggcaacgctacctttgccatgtttcagaaacaactctggcgcatcgggcttcccatacaatcgatagattgtcgcacctgattgcccgacattatcgcgagcccatttatacccatataaatcagcatccatgttggaatttaatcgcggcctcgagcaagacgtttcccgttgaatatggctcataacaccccttgtattactgtttatgtaagcagacagttttattgttcatgatgatatatttttatcttgtgcaatgtaacatcagagattttgagacacaacgtggctttcccccgccgctctagaactagtggatccaaataaaacgaaaggctcagtcgaaagactgggcctttcgttttatctgttgtttgtcgcattatacgagacgtccaggttgggatacctgaaacaaaacccatcgtacggccaaggaagtctccaataactgtgatccaccacaagcgccagggttttcccagtcacgacgttgtaaaacgacggccagtcatgcataatccgcacgcatctggaataaggaagtgccattccgcctgacct

SEQ ID NO: 2991 - DNA, 200 bp, synthetic construct
  source 1..200: mol_type = other DNA
gacgggaggctgtgtccgtgggtgtgcagtgcccagcacgggacccggctgcaggggaccttcaataaacacttgtccagtgacctgagtggatgcatgctgggtgctgggggaggacggggcacccggggctgggctttggggcaccgtgctcatgcctggccgtggtcccctccacagggggcaaagcggagggcagc

SEQ ID NO: 2992 - DNA, 200 bp, synthetic construct
  source 1..200: mol_type = other DNA
gggcgcccaggggggctggcgaggagctgccgccggatcccggggaccctcctactgatgcccgtggtcaccacaataaagagccctccaccctccccactgccttcgagtgctgcctggatgtttcactgggggtggaagccaggctgccgaggtcggcgggagatgggtgggggcagaagggtgctgttcacagggga

SEQ ID NO: 2993 - DNA, 200 bp, synthetic construct; identical to SEQ ID NO: 2780
  source 1..200: mol_type = other DNA

SEQ ID NO: 2994 - DNA, 200 bp, synthetic construct
  source 1..200: mol_type = other DNA
ggccccgtgtccacaggaggccacctcggtgtgaatggaaggaaacgctgcctctgcttgcgtgactctgctccccgattctccagagccccgtggttgctggcttgaataaaatgctcagtggcggctatggagggcactgctccttgggccccacgccagcagcaaggccctccccatgcacccgcacactcatgggc

SEQ ID NO: 2995 - DNA, 200 bp, synthetic construct
  source 1..200: mol_type = other DNA
tgctgccccgcatgcacgcggggggctggccgcacacgtgagagcacaggcctggagtcacaccccttgtacacatggacccccccacagacacggaccctgcggcacacacagcgcacagggcacacgcgctggcagccaggcacacgaagacaccaggtgcacagctgtcatcggccccacacgggggcgcacaaaca

SEQ ID NO: 2996 - DNA, 200 bp, synthetic construct
  source 1..200: mol_type = other DNA
atttcatttatctggaaaattttgtatgagttcttgaataaaacttgggaaccaaaatggtggtttatccttgtatctctgcagtgtggattgaacagaaaattggaaatcatagtcaaagggcttcccttggttcgccactcatttatttgtaacttgacttctttttttttctgcttaaaaatttcaattctcgtggt

SEQ ID NO: 2997 - DNA, 200 bp, synthetic construct; identical to SEQ ID NO: 2787
  source 1..200: mol_type = other DNA

SEQ ID NO: 2998 - DNA, 200 bp, synthetic construct
  source 1..200: mol_type = other DNA
acgcccacctccaggcagacccatcactggaagtgggatttgaaatgcagccaagaagaggagtccgtcggcaacgcccgcccggaacaagaaataaataaataaataatcagggttgtcttggctgataaacggtccccacctcgaagaagacttctcccccctctgcgctccctcctcctccctctccgggcagatcc

SEQ ID NO: 2999 - DNA, 200 bp, synthetic construct
  source 1..200: mol_type = other DNA
tcctggaagacacgtggcgcctgtggaccggaagcaccaaatgctggtgctgcttttgtacatacatatttttaaaccattaaaattcttcctgaagaaagctgattcctgacttttattttgttgccgccacagctctggcaggttgccatcctgttcaggcaaccatcttcagctgtctgtgggcaggtgagtgtgct

SEQ ID NO: 3000 - DNA, 200 bp, synthetic construct
  source 1..200: mol_type = other DNA
ttgttctcatagaataaaaaacagaactgaacttagccttcccagggaaggaaccatgccccacacatccagggagtgatgacagaggggacagcttgaagagctctgaaggacaataaaacccactcctcagtcctagctgctgctttcagtctctcctagcggctgcccctctgccccagccagtgaggccaggaagg

SEQ ID NO: 3001 - DNA, 200 bp, synthetic construct
  source 1..200: mol_type = other DNA
ttgttgctgggagcggcggcagcgagtccctgcaacagcaataaacttccttctcctcgggccacctggatccttgatttgtgcagcttctgttgcttccctcctctctggtgctgcccctttccacactatggagccaaagagagtccccactcagccagtttcccccaccctgcattagacaggtggggaaacagagg

SEQ ID NO: 3002 - DNA, 200 bp, synthetic construct
  source 1..200: mol_type = other DNA
gctggcggcccttctgactgtttatttaaggatggatggcaccctggaaccgggaagggtggcctgttccctagagagaataaattggattattttctaatgctgcctataggtccctgtggggtgggtggggagctggcagctacaactgatgccacagaaaggctgtaccacccaggaaccagccttcctgggaaggt

SEQ ID NO: 3003 - DNA, 200 bp, synthetic construct; identical to SEQ ID NO: 2728
  source 1..200: mol_type = other DNA

SEQ ID NO: 3004 - DNA, 200 bp, synthetic construct
  source 1..200: mol_type = other DNA
caaataaagtcatgatattttcctggctctgctgtgcctgtcttgtacctggcaccatagaccctcccacctgcccaggaggaaatgcacatacccccgggtgcccagctggcagcccctgcacgtgtctgcccctggaaccccctggggggctggtttttcaggctggtttttcagcctgacaaccccctggaaccccc

SEQ ID NO: 3005 - DNA, 200 bp, synthetic construct
  source 1..200: mol_type = other DNA
ctgtgggctgcttcacatccaccccggctccccctgccagcaacgctcactctacccccaacaccaccccttgcccaaccaatgcacacagtagggcttggtgaatgctgctgagtgaatgagtaaataaactcttcaaggccaagggacagtggtctaattcaactctgtgtcccagcacctggcacaccagaagtgcc

SEQ ID NO: 3006 - DNA, 200 bp, synthetic construct
  source 1..200: mol_type = other DNA
ttcccgtttctatccaaaagagcaataaaaagttttcagtgaaatgtgcaattctgttgtgtgttctgtgaaaggatcctggccatattcaagtccttggacctcaagccacttaaagcttcgatgggagtagctggtaacaaccccgtcatcctctgattggatgccagtatttcctggcagatccaagtccaagcttc

SEQ ID NO: 3007 - DNA, 200 bp, synthetic construct
  source 1..200: mol_type = other DNA
agcacccgccccctcaacccgctgctccgccaggctcttgggtgggccatctcgccaggcacgtaggaaaggcctgggaccagctgggccagggagggggcggtgccgacccgccccttggtaactcgagccccggctggcgggcctggctgctgggtctttgtcttctaggttcctctttctcccaagaagggctaagt

SEQ ID NO: 3008 - DNA, 200 bp, synthetic construct
  source 1..200: mol_type = other DNA
cacaccagccccaggacctggggcgactggaggaagccaggcgagtggggcccaggactggttccagtgagagaaaccaaccacaggcacccaagcactaccagacaaagcgtattaaacagaacacttttgaacctttgtcctggcaattttggaggtgtatggtgggaggggtatcctgggaagagccccctaggtct

SEQ ID NO: 3009 - DNA, 200 bp, synthetic construct
  source 1..200: mol_type = other DNA
tgcacaccgtgtgccatagaatggcacatgtcattgcccacttctgtgtagacatggttctggtttaactaatatttgtctgtgtgctactaacagattataataaattgtcatcagtgaactgtgtttgatgccttcttctatctggaagagatagacagacaccaatggactgctaaaatggattagaggcgtccctg

SEQ ID NO: 3010 - DNA, 200 bp, synthetic construct
  source 1..200: mol_type = other DNA
cgtcccacgcaggcccacactgcccctctcattctcttcaaactgtgactttttacagactcgggcgggtgttctgcggccccccaggtgctatgggggaggggggcgttgaatggaattaaaccagaaagaaagcaagcggctccgtgtcctgcttcccctccttgcgcctttcctcccggtctccgcggagtcagccc

SEQ ID NO: 3011 - DNA, 200 bp, synthetic construct
  source 1..200: mol_type = other DNA
gtagagagctgtgagccccagccccacctgactccagcacacctggcgagtagtagctgtcaataaatctatggtaaacagacaagaggttagtaagtattcttttattgtgacaaaccctctcccaggcttagtcagctactcctttctctggccagagaatcccataaggaaatagcccccacagccagggctgctct

SEQ ID NO: 3012 - DNA, 200 bp, synthetic construct
  source 1..200: mol_type = other DNA
aaaagcaatggcaagtgctctccaataaagtagggggagaaagcaaacccaaaaacccgcttctaaaatggtgatatatattttacgctttaagtttacttatcctaaaacttacctacatctaccccagccttactactactctttccttttagagatcttcatggaatcaaagggcctcattcagacttccttttttt

SEQ ID NO: 3013 - DNA, 200 bp, synthetic construct
  source 1..200: mol_type = other DNA
agttagtccttgaccactagtttgatgccatctccattttgggtgacctgtttcaccagcaggcctgttactctccatgactaactgtgtaagtgcttaaaatggaataaattgcttttctacataaccccatgctgatgggttttatttagtataaaacatccatcaaacaccagtctctggcttctagaagagtcctt

SEQ ID NO: 3014 - DNA, 200 bp, synthetic construct
  source 1..200: mol_type = other DNA
ttgatgccatctccattttgggtgacctgtttcaccagcaggcctgttactctccatgactaactgtgtaagtgcttaaaatggaataaattgcttttctacataaccccatgctgatgggttttatttagtataaaacatccatcaaacaccagtctctggcttctagaagagtccttcagatgacagttgttgtccat

SEQ ID NO: 3015 - DNA, 200 bp, synthetic construct
  source 1..200: mol_type = other DNA
caatatgcacattgcttaacagtgaagtcaataatcctgtgttaagttttgtataagtatcctaaaagataatttcctaatgtggatttgtgttttcagtgattaaatgttttaataatttttccctttttgttgaggaatttaataattatgattgttataaataattatgtataattataatctagggtagaaaattt

SEQ ID NO: 3016 - DNA, 200 bp, synthetic construct
  source 1..200: mol_type = other DNA
cttggaggactgcaggaggagggcagggttgggtgggcaatggaaggagggaggagagaaatgaatggaataaatgcagaggatctcaggccggctgttctctgccccactgtatgtagccagcagggagagggttcttgaacaccctcctgtctatggaggagcaaagatggggaacactattcctccgaactccatgt

SEQ ID NO: 3017 - DNA, 200 bp, synthetic construct
  source 1..200: mol_type = other DNA
tgtttaaaaggtttttattaaattatacaaaaacaggcagttagaaattgtgttttcttcctgccccattgacatttctaaggccctaatgcatttgttctgaggtttgacagttgaagcccttcaccagtgctagggaaataaagcctcctcaaccttaaggatttcagtgataagagtctgaaagtctagcacttcag

SEQ ID NO: 3018 - DNA, 200 bp, synthetic construct
  source 1..200: mol_type = other DNA
gataataaaaacttgtctgtgatatggtgcctctttgagtggcagttgcttgatcattgtatagctggtgtggaagggcttctgcccccttcctcgaggacaggggtgtccagaatctgcgtctgagatctctctgcatagaggtgagtccaacactgctcctgccgtgaaagatgtcccaggatccatggcaggacggt

SEQ ID NO: 3019 - DNA, 200 bp, synthetic construct
  source 1..200: mol_type = other DNA
cagagcagctgctgatgtctggaggctgattttcctgttctctgttctccactggaaaggttgtttacgacaaacctccttgtcaaagtgtgtaaaaataaaggattgctccatcctatttgttctattttctcttggatcatgactttcttttcttttctttttttgtttttgagtcagagtcttgctctgttggccag

SEQ ID NO: 3020 - DNA, 200 bp, synthetic construct
  source 1..200: mol_type = other DNA
actttgtgtgtttgctgcccacctcccttttattttttaaatgcattaaaaactgtgctagtctcctttgcatggacttcaagctgcatgaaatgcaataaatctcattttagataatttagagtctgggtttctgtgtctgggggcattcatggggccactttgcttggaaaggttcatttgccctcagtttgtgtgtc

SEQ ID NO: 3021 - DNA, 200 bp, synthetic construct
  source 1..200: mol_type = other DNA
gggcccgcacaccacccacgtgcctccagacagcgagtgacatcccatctcctcctctgcattaaagatgacctgctgaacattgtcatatgtctctgtaatggggtggtgggacacatagtgtctaacacttcagtttctctgctgcttccctcccattgagaagccagtgccagggttgctgtgaagatgggagagct

SEQ ID NO: 3022 - DNA, 200 bp, synthetic construct
  source 1..200: mol_type = other DNA
ggccattgctccatctcacctctgctccagaaataaatgcctgacacctccccacaacctgcaatctgtcgggcactcttctcgttcaactccctgtagccctttgggactttgcggtcccctaagtagaaaattcctatgggcctgtctcctgggggcctctgtctgctggtggtctgcttaccacagaatcctaaggg

SEQ ID NO: 3023 - DNA, 200 bp, synthetic construct; identical to SEQ ID NO: 2759
  source 1..200: mol_type = other DNA

SEQ ID NO: 3024 - DNA, 200 bp, synthetic construct
  source 1..200: mol_type = other DNA
tgtatacctttaccctcaagtaccactaacacagatgattgatcgtttccaggacaataaaagtttcggagttgaactattgtgtagttttgtttgtgaaagattgtgcccatatcctcagttcttcttagcctctgctccttccctgggaaccctctctatatcctcttcacaagtcatgggggttaggtatcagtgaa

SEQ ID NO: 3025 - DNA, 200 bp, synthetic construct
  source 1..200: mol_type = other DNA
accacagcttcttggcctcccttccagctctgcagctaatgaggtcctgccacaacggaaagagggagttaataaagccattggagcatccatattgcttgcttgtcttatttgcctggtcaggcctgagatggaggctgtttccctcagggatgacagacctcgggctgctggatgtgacctgcccttgaagcccaaat

SEQ ID NO: 3026 - DNA, 200 bp, synthetic construct
  source 1..200: mol_type = other DNA
gttggtcattgattaaaaaaggagaagccctctggggatgtcttgtgattgtgattttgtgtgtcaggggggtgctggagggaagtggtggagagaatacttgtgttggatggtgagttttccttactgtcctccacagagtttatcttccatttggggccatttggccaccaggggatgcctgagtctcaaactccaag

SEQ ID NO: 3027 - DNA, 200 bp, synthetic construct
  source 1..200: mol_type = other DNA
ataaactgcagtcacgttggcctgaagcaatgtgtattttaaaatgtgtttgtttgtattttatggagttagttatactactgccttagggcttccattgaagttttgcactggcatcatagcatttgatttactttttatcctttgttgagtctaataaacccagggttactgtaggagctggcaaaggaaaattagca

SEQ ID NO: 3028 - DNA, 200 bp, synthetic construct
  source 1..200: mol_type = other DNA
actgaatattggtgtggacatggggggtgggtgggagtagaaaattttgtgtatatcagggcagtatttttttatgaactataaatgattgtctttaataaatatgtgataaaatccaatttttattattttataaagacctgaacatgtgaactcttctcaattactttgtagaacactaacattctatgtgaagtatt

SEQ ID NO: 3029 - DNA, 200 bp, synthetic construct
  source 1..200: mol_type = other DNA
tgataacaaaatgctcttgcatgattttttaacaatatatttaaacaggaagttgtcactgatatactttattaaaaggatttttatcaatttgtttcagtttttatttacattcttttcaatatttggggtaaaggaattctgtttttatcaatcagcagtactggccaccatgggggaaattagaaaggtttggcttc

SEQ ID NO: 3030 - DNA, 200 bp, synthetic construct
  source 1..200: mol_type = other DNA
cagggcttgcaggtgctgatgccagaagcttctgtgccattgcattaaagacttgtcatttgatccatgttcaagacccttgaggtattgtttcatcatttctgtattgtctttcaataaagaaaacaaacatgtgcaaccagaattagagtcttcatttcaaaataccgctattatttagtttcagtttccatacagtc

SEQ ID NO: 3031 - DNA, 200 bp, synthetic construct
  source 1..200: mol_type = other DNA
aaagcttcctgaaggggtgttttggggacttcttccctctatttatttttatgtcaggtgaactggcatgctgaacatatatatatataggctcatttatagacttttatttccctgctattaaaacttttgaattttagcaatgagatctatttcagtttttgtaccatgtatgtaccaaattttgtactgaatatgaa

SEQ ID NO: 3032 - DNA, 200 bp, synthetic construct
  source 1..200: mol_type = other DNA
aagttccatttcctaaataaaaactaataaaatatagtactttccattatgattcatttaatacctttataaaaaatttttctgtaaaaatttactgcttgaaaaataaatgtagcttttctcatttatcaatttctataatgatacactatagaacaggtttttttggttttaaagttatctaatggtaaataatgccc

SEQ ID NO: 3033 - DNA, 200 bp, synthetic construct
  source 1..200: mol_type = other DNA
cccagcaattttctatgattttttcagatatagataataaacttatgaacagcaactatttctgtgttaagctcttattcttatgaaccttataggaaataccctgaaatattttggaaaagcaaaggagttgacaggtttttttctccaagaaaacaagtgtaactaactttttaagaaaaaaagttgttatttcttgg

SEQ ID NO: 3034 - DNA, 200 bp, synthetic construct
  source 1..200: mol_type = other DNA
tgttgacagatccctgaactaattatagtgaaacatactgcggcccacttccattaaatagatttgtgcaagatgaagtctgaagtgtctgttatccatagattacaaattgccacttgaccacttttttttttttttttttttttgagtcagagtctcgctctgtcgcccaggctggagtgcaatggcacgatctcggg

SEQ ID NO: 3035 - DNA, 200 bp, synthetic construct
  source 1..200: mol_type = other DNA
tgtcccctcacactgcagccaccaatggaggctactcccgaaagaaagatggtggcttcttctccacctagtgttgacagatccctgaactaattatagtgaaacatactgcggcccacttccattaaatagatttgtgcaagatgaagtctgaagtgtctgttatccatagattacaaattgccacttgaccacttttt

SEQ ID NO: 3036 - DNA, 200 bp, synthetic construct
  source 1..200: mol_type = other DNA
ctcttcagaggagctggacccagcatggatggtggaaccacagtacctcttacactccctgtggctccaacttcaggaaataaatttcccattgcgagggacccagctctgtttctgctgcttccatcaaagccaaaaggacctacactaaagaaatgcagggtgggggtggggaaccctgagcacttttttacaattgg

SEQ ID NO: 3037 - DNA, 200 bp, synthetic construct
  source 1..200: mol_type = other DNA
gcccctctggtgtcagaaaccagggaaaacccttgtcttttcttctaagtgacatgttggaagccttctcatcccggggcaaagcaggcatcaaaaccagaataggccaatctcttttccattaaataaactgtaaacacaagaacccaccgagttctctgagattcttttcttgaattgaactctgcaactcagttgtc

SEQ ID NO: 3038 - DNA, 200 bp, synthetic construct
  source 1..200: mol_type = other DNA
tggcaacttaactgaagaagggatgtccgctatatccaaaattacagctattggcaaataaacgagatggataaaggtgtgtgtctgtatttgctttgactagaaactgaaagataagaagaaagctctgtggggtggtggaaagagcaccagaacagttctagaaatgtggtgtcccccaggttctttattccaccccc

SEQ ID NO: 3039 - DNA, 200 bp, synthetic construct
  source 1..200: mol_type = other DNA
aatgacatggatttaaatcaattgtttaaaaaaaaaaaaacgaaaaaaaaaaaaaaaacacaaaaaacccagaaaacttttaagtgttgctggaatatcctgcctacagtgggcacctccttgaagaagctgatagcttttacacagtattagattgaaataatggacagaaacacattcttgtcaagaaagggggagag

SEQ ID NO: 3040 - DNA, 200 bp, synthetic construct
  source 1..200: mol_type = other DNA
tgggtttgtgctcagccttttaaagctgcaggcagcaccacttgagatttccagaggacccagaccttcgttcattctaaagagtctgatagaattaaaaacaaagtgccttatcttgcactggagttcaagtgctcttttgttagttattcactgattgtacttgtggatggttgagcacaaaaaaccacctctacatt

SEQ ID NO: 3041 - DNA, 200 bp, synthetic construct
  source 1..200: mol_type = other DNA
tccagaagaagcatcttcctcagaagatctggggggatggaaagcaaaataaaggaggtgcctggatgcattatttgcagtgggataagtcgcagagtcttcaactaaacccccctctctatcccctgcagcccaggatacacctgaaagaatttggcatatttagatccattgctgtagtctcccctcatcaaatcttg

SEQ ID NO: 3042 - DNA, 200 bp, synthetic construct
  source 1..200: mol_type = other DNA
gatccaggtggacgaaaccatcttcctgctggagtcttacattgagtgcaccatgaagagtcagtgatccagaagaagcatcttcctcagaagatctggggggatggaaagcaaaataaaggaggtgcctggatgcattatttgcagtgggataagtcgcagagtcttcaactaaacccccctctctatcccctgcagcc

SEQ ID NO: 3043 - DNA, 200 bp, synthetic construct
  source 1..200: mol_type = other DNA
tgcagacaaacaaaccaagaccaaaggctctttttagagccacccaagttttcaaaaaaagagctaatgcgctatttcgtgatcagcccttcatttgacactttggtggctcttaaaagagcctttggggtgaatgagtatggtgtcaagcctcttaattacttgttcttgccaggcttgtgactctccgttttcttggg

SEQ ID NO: 3044 - DNA, 200 bp, synthetic construct
  source 1..200: mol_type = other DNA
tggaagaaggctgctatgactctttggatgggagtctggcaagaggaaattggaagataaaataaataataagtgaaataatctggttaccatctactccttcatgagtctgttctaaagtcacaactaaagagagcgccaggatttagaggcagcaagcgtagattggaaggggaggtgggtgacaattgaattagagg

SEQ ID NO: 3045 - DNA, 200 bp, synthetic construct; identical to SEQ ID NO: 2760
  source 1..200: mol_type = other DNA

SEQ ID NO: 3046 - DNA, 200 bp, synthetic construct
  source 1..200: mol_type = other DNA
cgctgggagcactggacacttaaatcctcatctgtcctcctttcctgtaaataaaagcccttctatccattttgcctgcctccttccttgggctttggggtgagaatcttggcgctaacccccaagggttactgccagttcaccaggggattatttatactctggggatcagcaggcagggaggttcaggttactaggag

SEQ ID NO: 3047 - DNA, 200 bp, synthetic construct
  source 1..200: mol_type = other DNA
cactgcatttccctttaccaactagcgctgggagcactggacacttaaatcctcatctgtcctcctttcctgtaaataaaagcccttctatccattttgcctgcctccttccttgggctttggggtgagaatcttggcgctaacccccaagggttactgccagttcaccaggggattatttatactctggggatcagcag

SEQ ID NO: 3048 - DNA, 200 bp, synthetic construct
  source 1..200: mol_type = other DNA
actggagggaaagggtagctgagtctgcttaggggactgcatgggaagcacggaatatagggttagatgtgtgttatctgtaaccattacagcctaaataaagcttggcaactttttttccttttttgcttcaaatattgatggttttgagtgtgagagaggggaggagtccctggcctgaaggagaaccttccttgttg

SEQ ID NO: 3049 - DNA, 200 bp, synthetic construct
  source 1..200: mol_type = other DNA
gtcatctggaggcatgagagccctactgccatcagtgtgggtttccaagctgccttgggctctgtctactgtcgcaaaagcttttaaagatattcattaaacacggaccttcctgctctctctgctttatttcactcaagaggaggaagccatccttcaggggagggctgctgtgccccactttgacgtgtgaggcagcc

SEQ ID NO: 3050 - DNA, 200 bp, synthetic construct
  source 1..200: mol_type = other DNA
acatggaatcaggggcccgggatgtgattcaggacactttccatcctaggaataaagggtagtgcaatcatcaagtgttcacggtttcttgggggggtgggtaatagggttgactggagtgggatatacaccttaacagagctaaattcactgaaaagatcacagggacctgaactacggaggaaagtacctaaggattt

SEQ ID NO: 3051 - DNA, 200 bp, synthetic construct
  source 1..200: mol_type = other DNA
ctgagttactgggcccagaggctgggcccctggacatgtacctgcagaataataaagtcatcaatacctcatgcctctctcttatgcttttgtggaatgaggttcctcggtgtggagggagggttggaaaacccaaaggaagaaaaagaaatctatgttatcccaccctacctctcacaagcctttcctgctttacccct

SEQ ID NO: 3052 - DNA, 200 bp, synthetic construct
  source 1..200: mol_type = other DNA
aaataaatagggaagatggagtcaccctctgggggtcctctctgagtcaaatccagtggtgggtaattgtacaataaattttttttggtcaaatttacccttgcgtcctggcttccgaatgatttctgttcctccttggcttagtgggacaccagccattggaagatttgctcacggtcaacctctgaaaatgactcatt

SEQ ID NO: 3053 - DNA, 200 bp, synthetic construct
  source 1..200: mol_type = other DNA
ccagggctgccctccaccctcaccctccaccctttgctgctgacctcggctgctcctctcacagaccctctttggccccctgccctcctctccctcccagatggacccttccatgggaggaaataaagtttccatcgcaggtgctgggagtctggttttgaagctgtcttgtctaccttggcctggggagaggggagcac

SEQ ID NO: 3054 - DNA, 200 bp, synthetic construct
  source 1..200: mol_type = other DNA
aaactcctctgatgtggttggggggtctgccagctggggccctccctgtcgccagtgggcacttttttttttccaccctggctccttcagacacgtgcttgatgctgagcaagttcaataaagattcttggaagttttgaggctgatggtttgagagtctctgggggcgtgggttggggactgagggatatgttgtgggg

SEQ ID NO: 3055 - DNA, 200 bp, synthetic construct; identical to SEQ ID NO: 2829
  source 1..200: mol_type = other DNA

SEQ ID NO: 3056 - DNA, 200 bp, synthetic construct
  source 1..200: mol_type = other DNA
agccgcctggctgagatggggtgggcagggcagagctgatcagggccgagcagaaccgcactcttcccaaataaagcttcctccttgaaacacaaatgtttcttacttacaccccatcctgatttcttttcttgagtccagagagtgggaaagctctctcttgacctgaggatggatctgaaaattatgagccccttgag

SEQ ID NO: 3057 - DNA, 200 bp, synthetic construct
  source 1..200: mol_type = other DNA
tattactgtaccaactgggcctcctctagcaggcccctgaaggcagtggaataaaatgaaatcttcgccctttaagaactcctgaccttaatgtggtagtagtatcttgtccttgaggggatttccttcccctcacccctaagactttcacaacctggtgactggaaagaaccaccacaaatcttcatttcctccagaaa

SEQ ID NO: 3058 - DNA, 200 bp, synthetic construct
  source 1..200: mol_type = other DNA
ctcccaccctaggagggagggaaggacaccgtcctagggtataacctggcaataaaccgtgcctctcactgtgcctgttgctctagctgtgtcttcctgctccagaggatgggagaagcagaagtgggtcaaatgctgccagctctgactggctgtgctcactctaaggggcccaggggcagggcagaacaggctggaaa

SEQ ID NO: 3059 - DNA, 200 bp, synthetic construct
  source 1..200: mol_type = other DNA
gaggcgtcctgctcgctcttccgcaccgtccttcccggttaataaaatgccctgtacgcttcacgtgggtcggggactggggtgagccgcgcactgcctcgcctgcagtcgggaaagcctgcccgcccgacctctccgagccaggccgcgcacaggaggcagggaggccgcgaagctactagggaggggtccggacctgg

SEQ ID NO: 3060 - DNA, 200 bp, synthetic construct; identical to SEQ ID NO: 2791
  source 1..200: mol_type = other DNA

SEQ ID NO: 3061 - DNA, 200 bp, synthetic construct; identical to SEQ ID NO: 2737
  source 1..200: mol_type = other DNA

SEQ ID NO: 3062 - DNA, 200 bp, synthetic construct
  source 1..200: mol_type = other DNA
ctagagattgcaagggcggggagaggaggctctcaataaataatcgtgtaaccttcttgtggttctgttcttgctcggcccagccagagtctggctctttccagaatgtgcagggtggggtgctgggaggactcgctgcacggaaccaggacccaggggccaaaagcttaggatatatcaaaccctctaggtgggtgaca

SEQ ID NO: 3063 - DNA, 200 bp, synthetic construct
  source 1..200: mol_type = other DNA
ggcattggtggaagctggggtcagaaaagagaaatgaccatttggaggggcggggcctcctagaagaaccttcttagacaatggggggaggatgggactttgttttttccaagaataaacttcaactcctgtcatgtgtcttggctactttcttggatgggaggaatcagagaagataggaagaagcaggcatcgcttct

SEQ ID NO: 3064 - DNA, 200 bp, synthetic construct
  source 1..200: mol_type = other DNA
acattaaagtgacgattcccactcccctcctctcagcctccctgatgaagagttgacaatctcaccgcccgcccttccctgccccgggctcctcccgctcgacccccacttcctttcttgtgcttcgtgtcctgttgacggttacatttgtgtataattattatattattattattattattatattttttttaatttgg

SEQ ID NO: 3065 - DNA, 200 bp, synthetic construct
  source 1..200: mol_type = other DNA
gattctcatcccttacagctgactcttccaggcaatttccatagatctgcagtcctgcctctgccacagtctctctgttgtccccacatctacccaacttcctgtactgttgcccttctgatgttaataaaagcagctgttactcccacatctgttgttaacccttatttcattttctgtagagccggcctttaagttct

SEQ ID NO: 3066 - DNA, 200 bp, synthetic construct; identical to SEQ ID NO: 2756
  source 1..200: mol_type = other DNA

SEQ ID NO: 3067 - DNA, 200 bp, synthetic construct
  source 1..200: mol_type = other DNA
ggggagccttcgtggccctcaggatgccttcgggggacagattctgcccagtctctgggcatccataattgctgctaacctagacatttcatagttacagattaaatctacttgactttaaggaacagcttggctttcttgtgggaatgtggctgctacagggtactgaaggtggagtaaaataggatggggggaacccg

SEQ ID NO: 3068 - DNA, 200 bp, synthetic construct
  source 1..200: mol_type = other DNA
gagttttgtgggagggaacccagacctctcctcccaaccatgagatcccaaggatggagaacaacttacccagtagctagaatgttaatggcagaagagaaaacaataaatcatattgactcaaggcttggtgtttctgtgaattcctttcctgtaggggtgaagcactataggaaatttcgaaagcatgtgtattgctt

SEQ ID NO: 3069 - DNA, 200 bp, synthetic construct
  source 1..200: mol_type = other DNA
tagtgccaagacacatcactaagcctcgttttgttttgctttgttgcaaacctataaagcgttatcaccagagctatctgcttcacttcaaatgcttattaaatttcaatctgagtctcaagatttgtctctgaaatttttggggggagggggaagggcagtaaataagtggacatacctttatttgcaaggaaaggata

SEQ ID NO: 3070 - DNA, 200 bp, synthetic construct
  source 1..200: mol_type = other DNA
ggaccaaggcctttgcatttttttctaccctgactcccacttctaatttctctttattgttattattattattttctctgctattgtaatatttttttgttaattaaatgttttggtcagaatcttagctgtagcctgaagttttctcccacttgggggtggaaattgttttgagtcacggaacagcatatgatgtgtgg

SEQ ID NO: 3071 - DNA, 200 bp, synthetic construct
  source 1..200: mol_type = other DNA
ccccaactctcattcatgaaaataaaaattgctggagcttggcttggtctggctgttctatcacctataggcataagaatgcggggcagcaaagaggcaaagtgtgcctgggatgcagaaagcaggagcagatgcgagtcaaagtcctttattagaaaatatatcaaaatcccagccccctgagccaggaccagaagagg

SEQ ID NO: 3072 - DNA, 200 bp, synthetic construct
  source 1..200: mol_type = other DNA
gaggcaggcaacaccaggagcagaaatgaaagaggcaagaaagaagtgctatgtggcgagaaaaaaagttttaatgtattggagaagttttaaaaaacccagaaaaacgctttttttttttaataaagaagaaatttaaaatcatcccccagtgcacttttgttcagcaccgatatgtctggccaggtgttggatcccgc

SEQ ID NO: 3073 - DNA, 200 bp, synthetic construct
  source 1..200: mol_type = other DNA
gaattataggggtttaaaaactctcattcattttaaatgacttacctttatttccagttacattttttttctaaatataataaaaacttacctggcatcagcctcatacctaaaactcctgactcttaccactcatttccgtttgagtctgtatctgaaatcagtagcctagtcctactagatgagaaaggagccacaag

SEQ ID NO: 3074 - DNA, 200 bp, synthetic construct
  source 1..200: mol_type = other DNA
aattgaacattcaaaaacccctggaagagtctctttaagacctcaaaccatttagaatgggcaatgtattttacgctgtgttaaatgttaacagttttccactatttctctttcttttctattagtgaataaaattttatacaagaagcttttataatgtaactccttgctaccagtaagtaagataatggctattactt

SEQ ID NO: 3075 - DNA, 200 bp, synthetic construct
  source 1..200: mol_type = other DNA
ttaacattcactgagtatccaaaatgaaataaacagaaggaccaaaaatttgagtgtttgatttctgttttgctattattttttctgaaattttgatgttgtttgtttagttttgtttatccaaattgtaagtgagctatgttaccagtcttttactcactaggtgaaactgagaaggtatcctcgtgcatttgatgaga

SEQ ID NO: 3076 - DNA, 200 bp, synthetic construct; identical to SEQ ID NO: 2741
  source 1..200: mol_type = other DNA

SEQ ID NO: 3077 - DNA, 200 bp, synthetic construct; identical to SEQ ID NO: 2779
  source 1..200: mol_type = other DNA

SEQ ID NO: 3078 - DNA, 200 bp, synthetic construct
  source 1..200: mol_type = other DNA
gggcgcaggtgcggggcagtgaacttcagaccccaaaggagtcagagcatgcggggcgggggcggggggcggggacgtagggctaagggagggggcgctggagcttccaacccgaggcaataaaagaaatgttgcgtaactcactgacgtgtggtctgcggctcatttttgcaagcagctctgatgaggctgttcccctt

SEQ ID NO: 3079 - DNA, 200 bp, synthetic construct
  source 1..200: mol_type = other DNA
cagactcttttgtctcacgtggtggatccggtggaaatccaagctctgggctggtaatttttatgagcattttcagcttttgcaaatacaaaatataattctttacaaaaataaatttttattctaatctaaatctgacttccctcttgtttcctccacttagctaaaatgtactaatttttgaagtcgggagtattcta

SEQ ID NO: 3080 - DNA, 200 bp, synthetic construct
  source 1..200: mol_type = other DNA
ggacagagatatgcccagagatgcatatgtgtatatttttatgatcttacaaacctgcaaatggaaaaaatgcaagcccattggtggatgtttttgttagagtagactttttttaaacaagacaaaacatttttatatgattataaaagaattcttcaagggctaattacctaaccagcttgtattggccatctggaata

SEQ ID NO: 3081 - DNA, 200 bp, synthetic construct
  source 1..200: mol_type = other DNA
aaatgcagcattcaattcagaaccagtgcctcaattattcttttaacatggaagtaaaatccagaagcttagaaaagaagcccaaaaatacagcaacaagcatgtttcacattaacaattttagaatatttttatattccgtaggaacaacaaacttacaaatctgctgagtgcgttaggttattggattggatgattgt

SEQ ID NO: 3082 - DNA, 200 bp, synthetic construct
  source 1..200: mol_type = other DNA
tgtccatatcaaaccattttaatttttgactctaatcagacttacatgtttcaagacattcacatgtagtcaacaccctttataaaatatttgtgtgttcagccagactgggcaggtgcagtctatttcatttgtacatgaaaacttcaacacagaggggaatcttgcagctgctttttattctaagtacatgagtcctg

SEQ ID NO: 3083 - DNA, 200 bp, synthetic construct
  source 1..200: mol_type = other DNA
agaaaggttttgtggtagcaaatgcatgatttctctgtgaccaaaattaagcatgaaaaaaatgtttccattgccatatttgattcactagtggaagatagtgttctgcttataattaaactgaatgtagagtatctctgtatgttaattgcaattactggttggggggtgcattttaaaagatgaaacatgcagcttcc

SEQ ID NO: 3084 - DNA, 200 bp, synthetic construct
  source 1..200: mol_type = other DNA
gttttagagaaatcaagaatttttaaaaacaagaatatcaacatttggttttgtgtataagtggtgtttgtattaaaatactttttcaatgaactgtataaactatgttttattaaactacaatatatcagtaagtgttgcaaccctttgtttttgacgtacagtaacctcttattactgggaaatataaggaagttttt

SEQ ID NO: 3085 - DNA, 200 bp, synthetic construct
  source 1..200: mol_type = other DNA
cttgcataaacttgtcatgtcatacagtttgtgaaaggacaccttgtaaagaagccttgaaactaataaaatgagttatacttacatagattcatagggtcctgtttggtaatattcaaatgtgtaagactctttgtaactatggcacagatatactaagtgcaggaaatattcaaaattaggaatagccaaacagacat

SEQ ID NO: 3086 - DNA, 200 bp, synthetic construct
  source 1..200: mol_type = other DNA
atattctgggagatgatgttcaccttcattttccaaaatgaatatcttaaaaatcttatgcagaaatttgcattttgtacctcaatatttctacgtcatgtgccttagtaaaaaaaaataataaataaataaaagatgagtgttgtgctatactgtttaaacaaatactgtgctgggggaaaaaggatttgggtatgttg

SEQ ID NO: 3087 - DNA, 200 bp, synthetic construct
  source 1..200: mol_type = other DNA
caaagttatattgtgatactcaaattcacagcagagtagttttgagtaacagtaattaaatccttctaaatatttgaactaagtatattctagatttatttaatgggaaatacctttagataatattttctaaatttatgtaatactttaaacattcgtagcttgaatatgtgaggaactattcatggtcattcgcatgc

SEQ ID NO: 3088 - DNA, 200 bp, synthetic construct; identical to SEQ ID NO: 2846
  source 1..200: mol_type = other DNA

SEQ ID NO: 3089 - DNA, 200 bp, synthetic construct; identical to SEQ ID NO: 2769
  source 1..200: mol_type = other DNA

SEQ ID NO: 3090 - DNA, 200 bp, synthetic construct
  source 1..200: mol_type = other DNA
caaagctggtatttccccgcatgtcttattcttgcccttcccccaaccagtttgttaatcaaacaataaaaacatgttttttttttttttttttttttgcctttcctgtgtgctgttttgttggggcgggggtaaggaaggctgcaacctggatttggaaaccccttgtggatgcgaggatgaagggggtgcatggggtg

SEQ ID NO: 3091 - DNA, 200 bp, synthetic construct
  source 1..200: mol_type = other DNA
ggggccctaacacttgcacctgccttgctcaagagcagccccaagggttcaggggtgtttctgtctccaccaccttcacagcagtacctgattccctaccgtgaaaactcttactaaataaaaccgtcttccctgagagaggacagttctgctttcctagcagtgggaggcctgtgcttggttggggtcactgatgccaa

SEQ ID NO: 3092 - DNA, 200 bp, synthetic construct; identical to SEQ ID NO: 2758
  source 1..200: mol_type = other DNA

SEQ ID NO: 3093 - DNA, 200 bp, synthetic construct
  source 1..200: mol_type = other DNA
ggctggcccctagtgagtgggctcgagggagggttgcctgggaaccccaggaattgaccctgagttttaaattcgaaaataaagtggggctgggacacacgacctcctgagcctccgtgtgtggcgctggatggggaagggagggaaggcccagcacagacagctcctgccttcagtgaaaggggccttgagattcgtcc

SEQ ID NO: 3094 - DNA, 200 bp, synthetic construct
  source 1..200: mol_type = other DNA
gccaacttctgtataccttcacccatttcatgaaaataaaatcaaaagggaaatcaaaaataaagaaaacgctaaagaaaaaacaatagcccacattgcctctctttgggaaaagctatgacttcagcttttggtaccttccgctgactttgccaggcctgtcaagatgatccttctgccttagactgagtggtcacata

SEQ ID NO: 3095 - DNA, 200 bp, synthetic construct; identical to SEQ ID NO: 2723
  source 1..200: mol_type = other DNA

SEQ ID NO: 3096 - DNA, 200 bp, synthetic construct
  source 1..200: mol_type = other DNA
ggaggcttcgtgggcttttgggtcctctaactaggactccctcattcctagaaatttaaccttaatgaaatccctaataaaactcagtgctgtgttatttgtgcctcatttccccaggaatagtcactgccttgaggaacctcatccttttccctttttttctgcttgatgtctgctgtcttccctgttttctttttctg

SEQ ID NO: 3097 - DNA, 200 bp, synthetic construct
  source 1..200: mol_type = other DNA
cttgggcccttccctgctatcctttttctcctttggaggtgcccaacctcctccacccccttcccctactctaggggagagagctgctagtgagatgactgttttataaagaaatggaaaaaagtgaaataaaaaatatgttgaatcagattttttaaaaggggtatttgtttttttataacaggtattgaaacaagtta

SEQ ID NO: 3098 - DNA, 200 bp, synthetic construct
  source 1..200: mol_type = other DNA
ccgcctgccaatcggagcacagctggactgtgtggctggggcctgacactgagctgtagggaaactgaactgtgaggacctctggtgagaggccagtgccctgccccaccctggagcttcaaataaagagctttttaccccctcttgcctggtgctgccctgttgaagataggggattcgaggttggggaggaaaggtca

SEQ ID NO: 3099 - DNA, 200 bp, synthetic construct
  source 1..200: mol_type = other DNA
tcctgatttttgctccagaatatctttgagaatgacaacttaattaaaagatacttaggcactttttttttttttttgagtctgagtttcgctcttgtcatcctggctggagtgtgatggtgcgatcttgactcactgcaacctctgcctctcgggttccagcaattctcctgcctcagcctcccgagtagctgagatta

SEQ ID NO: 3100 - DNA, 200 bp, synthetic construct
  source 1..200: mol_type = other DNA
gggggcaggagtcagcaataaagctatgtctgatattttccttcactaatatgaataatagcatgcttttattttaccaaggttcaggttgcatgggatcatcttctctgactgatttgacatcaacagccaaacggtgggggtctccttaacgcccccctacagaaatgaaaatgcatttcctgtctcaggatgctgaa

SEQ ID NO: 3101 - DNA, 200 bp, synthetic construct
  source 1..200: mol_type = other DNA
atgataactgagcactttagggaacaacctgccttatctactatttaacaataactagaaaatatgcttctgtgtgctgaaagtagtatgtgttatcaataaaattgatagtattcatagaaatacaaaaatatccaagattgatgaaatttgtattgtgaatgtaaacactctggtttgtattgaacataaacagttaa

SEQ ID NO: 3102 - DNA, 200 bp, synthetic construct
  source 1..200: mol_type = other DNA
agactactgttatttgaccaatgaattgacttctaataaaatctagtggtgatgcattacatgcctgtttcttttgtccaaaacctcgattgtttcaagtgaatctgttggatgaagtgactaaaatccaaaatttggagttggtcaaaagaaccaccaatggctgttaaattttgctgcatatttgaccttaagaatgt

SEQ ID NO: 3103 - DNA, 200 bp, synthetic construct
  source 1..200: mol_type = other DNA
aacgtggtgcagctattgcggtaataaaatctttaatgcactcggtttgagggtgagctgttagtttgacattctctactttctgggttcgcatttcagaaatgatttgggggattggagccaagtttgccacaggtgatgcctggaacttctcacccacttacctctgccaccatctctctctttccaggcactttagg

SEQ ID NO: 3104 - DNA, 200 bp, synthetic construct
  source 1..200: mol_type = other DNA
ctaacaggtccaaccctaagtgagtcatgtttctccaggatgccaaaggaaatgctacctcgtggctacacatattatgaataaatgaggaagggcctgaaagtgacacacaggcctgcatgtcactgtgtcggtgtgtttcattacaagacgatggaaataaataccacgtcaattggctctcattttacgaactaaag

SEQ ID NO: 3105 - DNA, 200 bp, synthetic construct; identical to SEQ ID NO: 2774
  source 1..200: mol_type = other DNA

SEQ ID NO: 3106 - DNA, 200 bp, synthetic construct
  source 1..200: mol_type = other DNA
tgatcaagaacaggtactacccctttttttcatttcaaacttgaaactgtgaataaggtaagaaaactattttgaataaataaactatttatttaaaatgtctttgtatttttccaatttccattcttcacattgagttttgatttgaactcagtctaaaattaataaactttacaaagcaaagctcaaaacattaaaag

SEQ ID NO: 3107 - DNA, 200 bp, synthetic construct
  source 1..200: mol_type = other DNA
ggacccgcggggtgggggcgaatctatttttgcagaatccgggggcggccccgggtgggcgcgagtcgctttgtatcatcaataaattatttaacgggtccccgtcggagccgtcgctccggagcctgcgccgcgtgtttcttccgactcgaacccggagcgaggcggcccctccccggccccggcttcgcccctgcgcc

SEQ ID NO: 3108 - DNA, 200 bp, synthetic construct
  source 1..200: mol_type = other DNA
tcccggctgcggccagtctcccctctccaggccgaggcccctccgccctgacccctcctgctgccttcccacccccgttcttgggtatgttcaataaaaggattgttttcctagagtccgggctgtgtaggagtgcgggtctggagtcggggagggagtggcgccctgcagtgctggggctgcaaaggtcagggcagggt

SEQ ID NO: 3109 - DNA, 200 bp, synthetic construct
  source 1..200: mol_type = other DNA
aacccagtctaatgagaactccagaaagctggagcagcccacctagagctggccgcggccgcccagtctaataaaaagaactccagaacacgtactggcatcttggctggtggggaattgggtccaggctgaacacgggtgaggcccagggagggaggggacctccacggcctccctgcacaccaactcacttctgtctt

SEQ ID NO: 3110 - DNA, 200 bp, synthetic construct
  source 1..200: mol_type = other DNA
tgcaccacatgcctctgtctccccgctgagcccaggcacttgcccaggccgccctgcaggaccactgcaataaacgccttctcctgccactgtgtgtccggctggagcctggaggggatgcagaaatagggcccgggcccgctcaccagggtcccctgacaaggacgggggaggggctcctctccagactcagccaggcc

SEQ ID NO: 3111 - DNA, 200 bp, synthetic construct
  source 1..200: mol_type = other DNA
ccactcgctgcccctacgcctgccccggtgcccggctcccagcagaacatactagggagatgcacccagagcctgccagggagggctggcctcaccaccaccgtcaataaaggatttgaatccccatggctggtctggtctggctctccccagcctcttgggccatgctctgggcccccgcatcggtggcctgcagtgtg

SEQ ID NO: 3112 - DNA, 200 bp, synthetic construct
  source 1..200: mol_type = other DNA
cgctgcccagacacagactggcaataaactcctactaaatccctccgacctcttccggcctggtttctgcaggctcacgcatggtctgcctgcgtccttcagtgagggatggggcctcgggctggagggcttcctcaaggagggcgcctacagctgggcaaagctctggggaggacagaaccacccaaattggttcactg

SEQ ID NO: 3113 - DNA, 200 bp, synthetic construct
  source 1..200: mol_type = other DNA
gatcctggactgtttcctgataaccataagaagaccctatttccctagattctattttctgaacttgggaacacaatgcctacttcaagggtatggcttctgcctaataaagaatgttcagctcaacttcctgattaatttcacttatttcatttttttgtccaggtgtgtaagaaggttcctgaggctctacagatagg

SEQ ID NO: 3114 - DNA, 200 bp, synthetic construct
  source 1..200: mol_type = other DNA
gttctcttccagtttgcaggtgttcctgtgaccctgacaccctccttctgcacatggggactgggcttggccttgagagaaagccttctgtttaataaagtacattttcttcagtaatcaaaaattgcaattttatcttctccatcttttactcttgtgttaaaaggaaaaagtgttcatgggctgagggatggagagaa

SEQ ID NO: 3115 - DNA, 200 bp, synthetic construct
  source 1..200: mol_type = other DNA
cccgtctaccaaaataaagttgtagtgattccatgaaagatttctgagatatgggggtagagtagggtgtgtgcacaccaagaaggcagaatgtgacacactaggagaaaggtacagtgtgcataactgagaaaagaggaggtatattcacaccgaaggtagaagagggcatgtgcctggcagccgggaaggggaaagtg

SEQ ID NO: 3116 - DNA, 200 bp, synthetic construct; identical to SEQ ID NO: 2803
  source 1..200: mol_type = other DNA

SEQ ID NO: 3117 - DNA, 200 bp, synthetic construct
  source 1..200: mol_type = other DNA
gccacatggagggagtttcattaaatgctaactactttttccttgtggtgtgagtgtaggttcttcagtggcacctctacatcctgtgtgcattgggagcccaggttctagtacttagggtatgaagacatggggtcctctcctgacttccctcaaatatatggtaaacgtaagaccaacacagacgttggccagttaaa

SEQ ID NO: 3118 - DNA, 200 bp, synthetic construct
  source 1..200: mol_type = other DNA
catttaaagtctgaagtccaccagaacttggaagaaagctgttaactcaacatctatttcatctttttagctcccttcctttttctctgctcaataaatattttaaaagcatatttgaaataaagggagatactttttaaatgaaaacactttttttgggacacagatattaaaggattgaagtttatcagaaccaggaa

SEQ ID NO: 3119 - DNA, 200 bp, synthetic construct
  source 1..200: mol_type = other DNA
gtctgaagtccaccagaacttggaagaaagctgttaactcaacatctatttcatctttttagctcccttcctttttctctgctcaataaatattttaaaagcatatttgaaataaagggagatactttttaaatgaaaacactttttttgggacacagatattaaaggattgaagtttatcagaaccaggaagaaaacaa

SEQ ID NO: 3120 - DNA, 200 bp, synthetic construct
  source 1..200: mol_type = other DNA
cctgccagagcccaagtgccatcccacattcggaccctgcccatacccctgcctgggttttctaactgtaaatcacttgtaaataaatagatttgattatttcctactagaggccctaagtctggtgggcaggggctggcggtggatggtgggttcagtagaaccagcctggctctgacatcaggcagaagctgtgtgag

SEQ ID NO: 3121 - DNA, 200 bp, synthetic construct
  source 1..200: mol_type = other DNA
aacctgaattggaattacttctgtacaagaaataaactttatttttctcactgacagttgaaattgacttattggaaatattaactaaagcccatattagaccataattgtctggtgttaacatttttctgtcctagacttgtctcactttttttgactttggaatctgaggtttcaccactgtcacccctctttttatg

SEQ ID NO: 3122 - DNA, 200 bp, synthetic construct
  source 1..200: mol_type = other DNA
gtggaagattttattaaaatcctacgtgaagttgataaggcgcttgctgatgacttggaaaaaaacttcccaagtttgaaggttcagacttaaaacctgaattggaattacttctgtacaagaaataaactttatttttctcactgacagttgaaattgacttattggaaatattaactaaagcccatattagaccataa

SEQ ID NO: 3123 - DNA, 200 bp, synthetic construct
  source 1..200: mol_type = other DNA
taagcatttattcttttgacttgattattgtctccttttcatgtgaatttattactcccgttgaaaccgtgtacttaccaataaactatttgctattcagttttagttgtttttaattgttaaatgtaaagaatattcaacacacattctgccaagttctgttagttcaaaatatatggataaaaatgtaacccaaaaaa

SEQ ID NO: 3124 - DNA, 200 bp, synthetic construct
  source 1..200: mol_type = other DNA
tttttaatatctgtatataagttgtgtattttaagaataaattatgtatcctaaatatccaatcacatttgtaagcgtggaagctctaaatttgaaactgtacttaataaaaatttttttgtataacttcgtgtgtcagaagctattagtcatatggtgtattgctgttaagtacttgagttgatttataattactgtgc

SEQ ID NO: 3125 - DNA, 200 bp, synthetic construct
  source 1..200: mol_type = other DNA
tcacagaggcattttgtgtgtgtgtgcttattttaattttgttcttattctagcaacattagaataaaagataaacctactataattccctttgtggaaatttacatgtgtgcactcatttatcagagttacctgttattagggatatagagcaacaaggccaaggagattgccgcccttacagaattctctctcgccat

SEQ ID NO: 3126 - DNA, 200 bp, synthetic construct
  source 1..200: mol_type = other DNA
cagacctcccggaaggagggtgtggggaggggtggggcagggagcccctcttccctaataaaactgactccggcagcgtcccagcgtgcggcctctccgtgcctaccggccaggccccacacacagccctggtcgccaccagcgttcctcccaggacacccttgactgcgctctcctgtgacgatgccactgcagcccgc

SEQ ID NO: 3127 - DNA, 200 bp, synthetic construct
  source 1..200: mol_type = other DNA
gggccactcatattctgggctcctggaaccaatcccgtgaaagaattatttttgtgtttctaaaactatggttcccaataaaagtgactctcagcgagcctcaatgctcccagtgctattcatgggcagctctctgggctcaggaagagccagtaatactactggataaagaagacttaagaatccaccacctggtgcac

SEQ ID NO: 3128 - DNA, 200 bp, synthetic construct
  source 1..200: mol_type = other DNA
ggcacacaggccagccccagtctcacggctgaagtgcgcaataaaagatggtttagggtccctgccgctgcttgtctgccttccctgggctctggctggaggagtgggggcgtgtgtgggaggcaccttccccaggtgctgacgcctggaaacccggagtcagccgtgggccccataccactggtcaggatgaggctttc

SEQ ID NO: 3129 - DNA, 200 bp, synthetic construct
  source 1..200: mol_type = other DNA
tccagggaacgcatgtggatcctagacagcgccttatctatgattgagtgtccgtgtaaataaattcctacttagacttaccactttgtgtgtgcttgtaatgtggagaagtgatgctttgggggggacacaggcaggcaggggtgtttccctgctctcttagagaggcactactaaaccagggagtctttgatgggttt

SEQ ID NO: 3130 - DNA, 200 bp, synthetic construct
  source 1..200: mol_type = other DNA
ggtccctgtcagtatacaccctggggtgtaccccaccccttcccactttaataaacgtgctccctgttgggtgtcatctgtgaagactgccaggcctaggctctctgtagagagtcttcaagatcccggagtggtagcgctgtctcctggtgaaggagtatttgtcacactggaatgtgactgtgtgtgtatgtatgtgt

SEQ ID NO: 3131 - DNA, 200 bp, synthetic construct
  source 1..200: mol_type = other DNA
tgggcccaataaacaatcatttcaaacctactgaaaccaggtgtggagaagttatttgtgacgactagaacagaactatttcttatgtgagaaacttcctccaagtcagctctgtccttccaaaactgtgacgttgattacaaatacttcatatatgccacaccctgcacagaggccaatgtcccccaaggctcaactcg

SEQ ID NO: 3132 - DNA, 200 bp, synthetic construct
  source 1..200: mol_type = other DNA
tttgtcaatcctaggggacaggagccaggctactgtctgtacccccactccatcccccaggggaacacccctgcccagctactttcctaatgaaataaagagcattgaagcagagaagtgtgacatcactatcagggtggctggaaaaaggaggggtgagctggggcggtgggtgcaggggtggaggagctagggccaga

SEQ ID NO: 3133 - DNA, 200 bp, synthetic construct; identical to SEQ ID NO: 2849
  source 1..200: mol_type = other DNA

SEQ ID NO: 3134 - DNA, 200 bp, synthetic construct
  source 1..200: mol_type = other DNA
atttagaagctgaagatccccaactgctccagcctctgccgctgccatgctttgagtccacgcccaccagccttgctctcttcaataaaccacaagcatctcacttttgtgccccctgcgtggttttggtctccttgttatggtggggggtctgcccctgtcagggtaaggtgagccaggacaaaaggaaagcagccgag

SEQ ID NO: 3135 - DNA, 200 bp, synthetic construct; identical to SEQ ID NO: 2753
  source 1..200: mol_type = other DNA

SEQ ID NO: 3136 - DNA, 200 bp, synthetic construct
  source 1..200: mol_type = other DNA
ccccttcatctttgataaagcactgacatctccttcctaataaatagaccctgagttctgtacatgcctgactccttcctgaatggctgggagggacaaaactaaggcagaggaagaggctaaaacggaacagtagaccctcttcctcatctttagtttccaacaaagacacttgtttgtaatctctgggtctgattaac

SEQ ID NO: 3137 - DNA, 200 bp, synthetic construct
  source 1..200: mol_type = other DNA
gggcctttgtcccattgtccctctgtgaccccttcatctttgataaagcactgacatctccttcctaataaatagaccctgagttctgtacatgcctgactccttcctgaatggctgggagggacaaaactaaggcagaggaagaggctaaaacggaacagtagaccctcttcctcatctttagtttccaacaaagacac

SEQ ID NO: 3138 - DNA, 200 bp, synthetic construct
  source 1..200: mol_type = other DNA
agaaaaggggcagactcctcacattccagcactttcccacctgactcctctcccctcgtttttccttcaataaactattttgtgtcagcttcttccttgactctgaaatgggttcagggccatttgaacaccctgtgtcccccatgcatctctcactttccgccattagaggggaggtcttcttgtccaggggaaggcct

SEQ ID NO: 3139 - DNA, 200 bp, synthetic construct
  source 1..200: mol_type = other DNA
cgcccctgtgcccactttgtaaataaactgctgaacacccaccatgaccctgagccttttgtgatgggagaaaggaatgaggggtagcttggggtgggggctgcctgagctggggcgacgggatatctgatgtcacaaaagccgggcctggaggcaggcaggctggcgtgggtggcacggagtccagggccacgcggggc

SEQ ID NO: 3140 - DNA, 200 bp, synthetic construct
  source 1..200: mol_type = other DNA
acccgccttcgggaccccgctcccagctctgagaggtcgccaaagcctgcagcctggcctgggcctggccaccccttctttccctccgcgccccgcccccgaggagcctaataaagatctcgttgtggcagctcctactgtctgagctctgactggggggaaggaaggcggcccaggtgttggatggagcccctggccag

SEQ ID NO: 3141 - DNA, 200 bp, synthetic construct
  source 1..200: mol_type = other DNA
aatattaatttataaaaaagaaattttaaaaagtaacaagaaagaactcgtttgaaaccatgtttcatcatcctgtagctacatctggtcttccttgtgtgctgggggactgcagataggtcaggggtatcagcctcagccactcagacaaggaaagggggcaccacatgagctcagggacccccacccccatccctggc

SEQ ID NO: 3142 - DNA, 200 bp, synthetic construct
  source 1..200: mol_type = other DNA
aataataaacgactttattcttggattccgttggcatctgctatttctgtaacagagaggagcaatgggccctgagtgtgtaaggcaggacaagtgacttgggaaaaaaaaaaaaaaaaacccgcccagcctgtgtccccctctgcaagcaggggataagaactgtgcctccctttctttgctggctccagagaggctcc

SEQ ID NO: 3143 - DNA, 200 bp, synthetic construct
  source 1..200: mol_type = other DNA
gggctcacctggatggggcctgcagtgcgttcccgctttgcttccttccctggacggcccgctccccgaaacgcgcgcaataaagtgattcgcagagctcgtgtccggctccctccttaaggcccgacgcccccggccccggcctcgccaaggggcagcgccccgccctccgggtagtggcggcggcgactggggagccc

SEQ ID NO: 3144 - DNA, 200 bp, synthetic construct
  source 1..200: mol_type = other DNA
cagactggggaggggcagggggagaggcccccatcagggaccagactgttccaaaaaaaaaacaaaaaacaaaaacaaacaaaaaaacacttaaaagcccaaggagtaagcctgtgtgtgtttgtgggccctgagagtctcagagtcctcagctccagcataccccaccaccttctcctttcccgactgtggagccttgg

SEQ ID NO: 3145 - DNA, 200 bp, synthetic construct
  source 1..200: mol_type = other DNA
gccctgggccagattacttcctccacccctccctatctcacctgcccagccctgtgctggggccctgcaattggaatgttggccagatttctgcaataaacacttgtggtttgcggccatctccttggttatgaatggctgtttcgctgagcgccaggcattctggcatcatcacagactgggtgagaatggtgagggcg

SEQ ID NO: 3146 - DNA, 200 bp, synthetic construct
  source 1..200: mol_type = other DNA
tggacatgaggggcatgagaataaagctgaactgcagcctcctgagtcttgctctgtctgttggccgcactgggtacctcagggcaccaggacacatgccgccccagtcctgctggttggtgggggtctgtgggcagagggcccctgcctggacagggcagcacaggcctttctccagggtcttggccagtccggccggc

SEQ ID NO: 3147 - DNA, 200 bp, synthetic construct
  source 1..200: mol_type = other DNA
ggagggggaagcaaaaggctgcctcgggtgttttaataaagttgttgtttatttccacctgccagctccttcatggggcgaggggtcggaggctggagtcccgggaggaaagcaagtcaagacaaatgcttgacccacggggactccaggcctggcctgcagccactctggtggacttggctttgggtctggggtcttag

SEQ ID NO: 3148 - DNA, 200 bp, synthetic construct
  source 1..200: mol_type = other DNA
ggcctggggagtcggaacagggctaaggagggggaagcaaaaggctgcctcgggtgttttaataaagttgttgtttatttccacctgccagctccttcatggggcgaggggtcggaggctggagtcccgggaggaaagcaagtcaagacaaatgcttgacccacggggactccaggcctggcctgcagccactctggtgg

SEQ ID NO: 3149 - DNA, 200 bp, synthetic construct
  source 1..200: mol_type = other DNA
acgggttaccctggtcattaataaagctgtgactggtcagccctgttgcttgtttctgagggatagctattgtcccaccagaccccagattcctgggcccacaagccactgctcagcttctccctgatcagtgctgacccagccagtcctaggggagagaagtgcaccaagggttcccagtgtttatccaaaggaggaag

SEQ ID NO: 3150 - DNA, 200 bp, synthetic construct
  source 1..200: mol_type = other DNA
gtcttttgtaattctggctttctctaataaaaaagccacttagttcagtcatcgcattgtttcatctttacttgcaaggcctcagggagaggtgtgcttctcgggttggtggtatgtcccctaggagaacagtgaggcagaaaaggcagaagcctttggtatggggggaagaaatggtaaactacaagagaaatttcctg

SEQ ID NO: 3151 - DNA, 200 bp, synthetic construct
  source 1..200: mol_type = other DNA
ccgtggcggtggcccttcccggctgcggagagcccgccccacagatgtatttattgtacaaaccatgtgagcccggccggcccagccaggccatctcacgtgtacataatcagagccacaataaattctatttcacaccccttgtgccgggctcagtctagcccctgggaggcggctggggtctggcgccgccctgcgca

SEQ ID NO: 3152 - DNA, 200 bp, synthetic construct
  source 1..200: mol_type = other DNA
gaaccagagcttgaaattcaaagctgcgatcccttcacagcagtaaaccagctctttggaaccgattccatcaccccaataaaggagctcttcacagcacctgtgagtctgggcgccttagagcccctaagccagcatgggccctttccccctccccaccaagaactttgcatggctctggcatatagaaacaatttatt

SEQ ID NO: 3153 - DNA, 200 bp, synthetic construct
  source 1..200: mol_type = other DNA
cccacctggccccctcagctctgtcctgttaggccaactgcctccttgccagccccacccccaggtttttgcccatcctcccaatctcaatacagcctgaataaaccaagacaagacctctggcttgtgagcagactcttctggtggatgggctgagcacagacaccattccctgagatatgtctcagttcccaaggagc

SEQ ID NO: 3154 - DNA, 200 bp, synthetic construct
  source 1..200: mol_type = other DNA
ggtgcctcccaacgctccgcccacgctgacaataaagttgctctgagtttggagtctggtcctcgctccggggagcaagtggggggcgtgcagatgtgcctgtgtctgtctctgagcacctggtgtccgtgtacaaggatggatgtgtacagtggctccttgggaactgagtcatatctcagggaatggtgtctgtgctc

SEQ ID NO: 3155 - DNA, 200 bp, synthetic construct
  source 1..200: mol_type = other DNA
gccttctgccccccagaccatagccccttttagttggttttagttgctctggggggaggagagaaggtagagctgttcttaaatttattaaaaaaaaaaataaaagggaatctcagtgtctgttccaggctctgcgcaggacgtcatggttgccatcccatccacccacctgccttccccacatgaaactgggagctggg

SEQ ID NO: 3156 - DNA, 200 bp, synthetic construct
  source 1..200: mol_type = other DNA
aagtccccgagggcgaaggccattgggtttggggccatggtggagggcacttcaggtccgtgggccgtatctgtcacaataaatggccagtgctgcttcttgcattggtttcttccaagtgcttcgcttctgcccccatcccccactcccacttctggcagctcccagctccccagcccaagctgagaggtcaccctgcc

SEQ ID NO: 3157 - DNA, 200 bp, synthetic construct; identical to SEQ ID NO: 2820
  source 1..200: mol_type = other DNA

SEQ ID NO: 3158 - DNA, 200 bp, synthetic construct
  source 1..200: mol_type = other DNA
ggcaggcccctccaacaggtgctcacagccaccgaggcaggggctgcagccacccactgggagtcttgtttttatttataataaaattgttggggacacctcagtgctagtctctggtgttgtctggctaggtcccccgagtcgggaggacaggacacgggccgctggtggcacacggacaagggtggggctaccagggc

SEQ ID NO: 3159 - DNA, 200 bp, synthetic construct
  source 1..200: mol_type = other DNA
ggttggggggactctgagcgggaggcagagtttgccttcctttctccaggaccaataaaatttctaagagagctactatgagcactgtgtttcctgggacggggcttaggggttctcagcctcgaggtcggtgggagggcagagcagaggactagaaaacagctcctccagcacagtcagtggcttcctggagccctcag

SEQ ID NO: 3160 - DNA, 200 bp, synthetic construct
  source 1..200: mol_type = other DNA
ccaccaccctggcctgctgtcctgcgtctatccatgtggaatgctggacaataaagcgagtgctgcccaccctccagctgccgctgctgtgactgtgctctttaccctttacccagcacacgatcctcaagggtgggaggggagaacagggtccagtctggcccatggccagagaaaggacagggtctcatctggcttga

SEQ ID NO: 3161 - DNA, 200 bp, synthetic construct
  source 1..200: mol_type = other DNA
gccccaccggcccgcagcccctgctgcccaataaaaccactccgaccccacggcctcttgtcttgactctggtggtccagggtggggccgttcccggcctgcctgaggcctgtggtgcctccaactggactaggtcgccacctagtctttatgctctctggagtcctgctgccccagccctgccttcctgtagactccag

SEQ ID NO: 3162 - DNA, 200 bp, synthetic construct
  source 1..200: mol_type = other DNA
ttaccgagttaatacttacaaaaggataaaaataaactcctgcttcccaaggagtccaggtttctgtgttctggtttaaagccgtgcatgcctgttgtagatagtttaactggagcagcatgtctgtaagcaccaggcccccgagccagagaaaacaggaactcggggagaatgacaagcatggccctcccagggctgga

SEQ ID NO: 3163 - DNA, 200 bp, synthetic construct
  source 1..200: mol_type = other DNA
ctccttttaccttctgatacctggaaatccctgccctgttcagccccacagctcccaactatttggttcctgctccatggtcgggcctctgacagccactttgaataaaccagacaccgcacatgtgtcttgagaattatttggatatgaatgggaacgtgactgttttgttttccaattcccattgattgaaaccagtg

SEQ ID NO: 3164 - DNA, 200 bp, synthetic construct
  source 1..200: mol_type = other DNA
ccgggacagggtcttgcaagcagcctcctgggcagtcgtaagggttgcggcgtgatgtcttcaataaattaagttttatttggattgagtaaaacttcaataaattacaagtttttcaaagaaaaaggacaaccaaaaaaattagggaaagagaatccctctgtcccattccccaggcagcccctccactcctctaacag

SEQ ID NO: 3165 - DNA, 200 bp, synthetic construct
  source 1..200: mol_type = other DNA
cagttgcagatatgagctgtataattgttgttattatatattaataaataagaagttgcattaccctcagccctgccttctgggttcatatccagtctcctgcatgctctcctagcaactccacaaggcagacctggttatccccattttacaggggtggaaaccaagatccagaagggatagagaatggtcccagtcct

SEQ ID NO: 3166 - DNA, 200 bp, synthetic construct
  source 1..200: mol_type = other DNA
caaagacctaacagttgcagatatgagctgtataattgttgttattatatattaataaataagaagttgcattaccctcagccctgccttctgggttcatatccagtctcctgcatgctctcctagcaactccacaaggcagacctggttatccccattttacaggggtggaaaccaagatccagaagggatagagaatg

SEQ ID NO: 3167 - DNA, 200 bp, synthetic construct
  source 1..200: mol_type = other DNA
cccagaccctggagctgaaggtcacggccagtccagacaaagtgaccaagacataacaaagacctaacagttgcagatatgagctgtataattgttgttattatatattaataaataagaagttgcattaccctcagccctgccttctgggttcatatccagtctcctgcatgctctcctagcaactccacaaggcagac

SEQ ID NO: 3168 - DNA, 200 bp, synthetic construct
  source 1..200: mol_type = other DNA
cactcaccccttgacacaccaatgaaggagctgacagtgagagtgctcccctcccaggggcagtgaagacacatatttaatctgcatgaaacatgtacagtagtcttgctggaatctaataaaaatggtccctctggctcagcaatgtttctctctgtctctgttgggcaggggtgcatacatgtgtataggtgggcctg

SEQ ID NO: 3169 - DNA, 200 bp, synthetic construct
  source 1..200: mol_type = other DNA
ataaaggaactgcttagatatgtgccaagcaattatttcatgggaaattaaccagaacttgaagaaagttgccagtggcatcagccatttgtttcagtagaactgttcagagcaccattcttccacacttggtcttgcccagcctagcaaccggattgtcaccatggtgagaagccactggccctccataagcactgaaa

SEQ ID NO: 3170 - DNA, 200 bp, synthetic construct
  source 1..200: mol_type = other DNA
tttaaacaaatatgtaaacaaaaataaaatggtaaaaacagtttatgtctaatgttatgtctaatgttatgcataaacatagacttgtaatttatcacgaggtataattctgggacctacaacaaaaggctacacagggcaacaaaaggctgaatctaagtaaaagctacccacttaaacaagtttaacttcacgagttt

SEQ ID NO: 3171 - DNA, 200 bp, synthetic construct
  source 1..200: mol_type = other DNA
cttttaaagttgtttggttttcaaggcactgataatggatatgtatgaagtccatgctgtctgttaaataaaatgccattctgcagaattaaccatcccaccagagcaatattgccctttgtagaattgttctagttaatgatcccaatctctgcctaacattggaaatttcatagagtataatctaacattggaaattt

SEQ ID NO: 3172 - DNA, 200 bp, synthetic construct
  source 1..200: mol_type = other DNA
taccccagatttaaaaaaagaacataaaaaataaagtaccacacatattgcactttttgccgaacgaaatttttacctcacgttcatctcaccaaagtctcttcagaggagcctggtttacagggtgatgaagctgatgatgatacagtagtgtacacactgctaacgtgaatcagactggaaagcaagtcagtacttca

SEQ ID NO: 3173 - DNA, 200 bp, synthetic construct
  source 1..200: mol_type = other DNA
atgccctttcttgaattgcattttttaaaacaagaaagtttccccaccagtgaatgaaagtcttgtgactagtgctgaagcttattaatgctaagggcaggcccaaattatcaagctaataaaatatcattcagcaacagataactgtcttgtgtttgaatattccacacacttttaaataaatatacagataccacaga

SEQ ID NO: 3174 - DNA, 200 bp, synthetic construct; identical to SEQ ID NO: 2745
  source 1..200: mol_type = other DNA

SEQ ID NO: 3175 - DNA, 200 bp, synthetic construct
  source 1..200: mol_type = other DNA
ggcgcccgccgccgccccccttcccggtgctcagaataaacgtttccaaagtgggaagcagcttctttcttttgggagaatagaggggggtgcggggacatccgggggagcccgggtggggcctttggccctggagcagggacttcctgccggatctcaacaactccgtgcccagactggacgtcttagggccaagatcg

SEQ ID NO: 3176 - DNA, 200 bp, synthetic construct
  source 1..200: mol_type = other DNA
cccaagaagcaacagccagctaatgctttattaaaattaccctcactagccttctgtgtgtgtctgtggaggtggggtctctaaggatggggttaagggtggaggtggagatcaactccaaggttggagatggaatgccttcagcttacagatgctcctgaggcaatggggcaggtgcctgccgtgcagcaaagggagtc

SEQ ID NO: 3177 - DNA, 200 bp, synthetic construct
  source 1..200: mol_type = other DNA
catgctctctaccaactaccatgaggctaaaagcaaagtcaacaaacccctattataccttccaccaaattctttatcattgtctttcttaggaaacagacatactcattcatttgatttaataaagttttatttttccaaatgtacagctggttggacctgtaaaaaaaaattaaaagaatcagaaccataaagctttg

SEQ ID NO: 3178 - DNA, 200 bp, synthetic construct; identical to SEQ ID NO: 2734
  source 1..200: mol_type = other DNA

SEQ ID NO: 3179 - DNA, 200 bp, synthetic construct
  source 1..200: mol_type = other DNA
cttctcccgatccctgagggcggtgagggggaatatcaataattaaagtctgtgggtaccatactgtctccttcttctttctgctggtatggcgaattcctctaggcggctcagagtattaacagtaagagaaggaatgggcttgaagtccgagaaaaggtaggcaggaagtttggtcgggtcaaaggggtgggtttcaa

SEQ ID NO: 3180 - DNA, 200 bp, synthetic construct
  source 1..200: mol_type = other DNA
ttaactcaggcagaagagcacagatgtgtgggattgggggaggagtggggacaagattttttatctccaagtgaattttctaaaaatgtattttataccggcttattcctagtattgaataaactagcgggctcactcagtgtggacagcgtggcctgggaggcagacagatggtgggggacagtgggtgggtagaacct

SEQ ID NO: 3181 - DNA, 200 bp, synthetic construct
  source 1..200: mol_type = other DNA
gcctcctgagcagctcttggttttggcgtcttttgggtcggcccatgtggtttgagcacccagccaggcggtctctttagaggatcctgtacacagttccactattaaaacatttcaggttgaattctgcagtattttcttccttgatttacaaaatgagaaatgtagtcacttagaacttgagcatgatttttgttaaa

SEQ ID NO: 3182 - DNA, 200 bp, synthetic construct
  source 1..200: mol_type = other DNA
ggctgctgcagctgcatgggtgcctgctgctgcctgccttggcctgatggccaggccagagtgctgccagtcctctgcatgttctgctcttgtgcccttctgagcccacaataaaggctgagctcttatcttgcaaaaggctgctggtgcactgtgtcgtagggctgagatggcaacggtgggcaggggctgagttctga

SEQ ID NO: 3183 - DNA, 200 bp, synthetic construct
  source 1..200: mol_type = other DNA
agttggccctcccttgtgccactgccaggggaggaaaggccttgatgttccagacaataataaatgcgcctgtgacttagccttggtgtcagtctcttgcggacctgacaacccccatctctccttccctgattccctctgcctttccaggccccatccccctgaacagctcctccctatggtcctggctgggcctaacc

SEQ ID NO: 3184 - DNA, 200 bp, synthetic construct
  source 1..200: mol_type = other DNA
agaccacaaggctgaaaagtgctttgctggagtcctgttctcagagctccacagaagacacgtgtttttgtatctttaaagacttgatgaataaacactttttctggtcaatgtctttccctgtttcctgttcattcaataaatatcattgtacatttccatatgattcccaatagaataccaagattaaacttaaagga

SEQ ID NO: 3185 - DNA, 200 bp, synthetic construct; identical to SEQ ID NO: 2766
  source 1..200: mol_type = other DNA

SEQ ID NO: 3186 - DNA, 200 bp, synthetic construct
  source 1..200: mol_type = other DNA
cacctcccgattgaaggagaaaaactttttgcctgagtcataaaacctttttttaataataaaatattgtgcaatatattcaaagaaaagaaaacacaaataagcagaaaacatacttattttaaaaaagaaaaaaaaggataaaaaaacccaaactgaaattctatatacgttgtgtctgttacaaatgtcgtagaaga

SEQ ID NO: 3187 - DNA, 200 bp, synthetic construct; identical to SEQ ID NO: 2815
  source 1..200: mol_type = other DNA

SEQ ID NO: 3188 - DNA, 200 bp, synthetic construct
  source 1..200: mol_type = other DNA
agtcatcacattaaacattgtaatactagttttttaaaagtccagcttttagtacaggagaactgaaatcattccatgttgatataaagtagggaaaaaaattgtactttttggaaaatagcacttttcacttctgtgtgtttttaaaattaatgttatagaagactcatgatttctatttttgagttaaagctagaaaa

SEQ ID NO: 3189 - DNA, 200 bp, synthetic construct
  source 1..200: mol_type = other DNA
atataattgaagcagcccagatgatcttccacaacctgtgatctaaggaaaaaaatctttcaactcctagagatttttttttttttttgagaaatgtagggatgttgctattaaaaatttccatggagtttatgagctctttatatcttttccatattggacagagcagttctctttgaggacactaggaacactgtggt

SEQ ID NO: 3190 - DNA, 200 bp, synthetic construct; identical to SEQ ID NO: 2731
  source 1..200: mol_type = other DNA

SEQ ID NO: 3191 - DNA, 200 bp, synthetic construct; identical to SEQ ID NO: 2841
  source 1..200: mol_type = other DNA

SEQ ID NO: 3192 - DNA, 200 bp, synthetic construct
  source 1..200: mol_type = other DNA
ctaataaaaccttccatctcatactgacccagtccttgacttattcttgccctacaccattccagaaacttgtgaaaagtgaaacaactatttatgtgtaagaccctgtgctagatatattttcttcacagtaacttctcagccttgcttcccaaatcatttgaaaccatagtttctaggattaaataacgtgaccaaat

SEQ ID NO: 3193 - DNA, 200 bp, synthetic construct; identical to SEQ ID NO: 2729
  source 1..200: mol_type = other DNA

SEQ ID NO: 3194 - DNA, 200 bp, synthetic construct
  source 1..200: mol_type = other DNA
aggagccgactccacctcccatagttctcccgcgtctggttggccccgtgtgttccttttcctatacctccccaggcagcctggggaacgtggttggctcagggtttgacagagaaaagacaaataaatactgtattaataagatgtttcttgagtctcctgtgtatatttcttttccacagttggctgagtgccttcgt

SEQ ID NO: 3195 - DNA, 200 bp, synthetic construct
  source 1..200: mol_type = other DNA
ccctgttccctcccccaaccctatccctcctacctcacccgcagggggaaggagggaggctgacaagccttgaataaaacacaagcctccgtttctctgtggtgtgtttcagagagctactagctccagtgtcgggggtgggagtggaaggttcaaaggtggtttccctgagggacaggtaccttttggggagagggtgg

SEQ ID NO: 3196 - DNA, 200 bp, synthetic construct
  source 1..200: mol_type = other DNA
gggtctggtctcctcagcctcctcatctgggggagtggaatagtatcctccaggtttttcaattaaacggattattttttcagaccgaaaagagatggtctgagtttgtcttagagtgatgcttgattccttcctttccttactgatgttccctgtcctctgggaccttaatgcatgtgtacttcgaggtctattttggg

SEQ ID NO: 3197 - DNA, 200 bp, synthetic construct
  source 1..200: mol_type = other DNA
gtactctcatatgatgctgtgattttcctggagttgacagaaacacctatatttcccccagtcttccctgggagtctactattaactgaaataaatactcagagcctgatgctggtttttctgttgcttcttgggagaatctacgtcatttaaggagtgaaggtataaaagaaggaagtgtaccacttacttagcagatc

SEQ ID NO: 3198 - DNA, 200 bp, synthetic construct
  source 1..200: mol_type = other DNA
attaaaataaatttggatttgctcataatgatgtgctttgtatgctgctcttgtttgatggaggtggggagaatgtcagttgaagtggtattggaactgttcctccacagtgccatgctctaccttcccaaaacgaggaatgtcttgacttgcagaagacacaaatcttagaatctttgatgatatagtaatctgctgga

SEQ ID NO: 3199 - DNA, 200 bp, synthetic construct
  source 1..200: mol_type = other DNA
tccagtggggtccggacactgggccccgcaggcgaaagcacgttccagccaccaggaggccacctattgtttcaaaataaagactgggttcctctcttggtttcagactgctatttttttcatggttgggggagcagcgggagtcggggagggtgctaggaggagagggcgggaaaagagggctctctcctcttccaatc

SEQ ID NO: 3200 - DNA, 200 bp, synthetic construct
  source 1..200: mol_type = other DNA
ggggtctttgtcctctgtactgtctctctccttgcccctaacccaaaaagcttcatttttctgtgtaggctgcacaagagccttgattgaagatatattctttctgaacagtatttaaggtttccaataaaatgtacacccctcagaatttgtctgattctcttggttctgacaacatagtcaacactgaagggttatgt

SEQ ID NO: 3201 - DNA, 200 bp, synthetic construct; identical to SEQ ID NO: 2828
  source 1..200: mol_type = other DNA

SEQ ID NO: 3202 - DNA, 200 bp, synthetic construct
  source 1..200: mol_type = other DNA
atttacaaaaagatttctgaagacagagctcctcaaaccattgtggatatcttctgccttcaaccacagatcaaatacttcaagagccatttaataaatatggcagaactatatatgtgtcttaaacctcaaagtaaattttccttgagaaataatttatgttgaaaagatttcctggccaagtgcagtggctcacaccc

SEQ ID NO: 3203 - DNA, 200 bp, synthetic construct
  source 1..200: mol_type = other DNA
gggaaaccccctgaagcccctaaaggcaagaagaaaaagtaaaagaccttggctcatagaaagtcactttaatagatagggacagtaataaataaatgtacaatctctatatacaagctgagtcctttccttttgtctactccaagccttccccctgcgtatgtgggattgagggtcacatcattggcactagtgagagg

SEQ ID NO: 3204 - DNA, 200 bp, synthetic construct
  source 1..200: mol_type = other DNA
agaccttggctcatagaaagtcactttaatagatagggacagtaataaataaatgtacaatctctatatacaagctgagtcctttccttttgtctactccaagccttccccctgcgtatgtgggattgagggtcacatcattggcactagtgagagggtagtcagtagccacttctgggaaaggtgggtagtgtggccca

SEQ ID NO: 3205 - DNA, 200 bp, synthetic construct; identical to SEQ ID NO: 2783
  source 1..200: mol_type = other DNA

SEQ ID NO: 3206 - DNA, 200 bp, synthetic construct
  source 1..200: mol_type = other DNA
ttaaaagtatctcagctcaactgaagaacaacaaaaaaaatttaatgagaaaaaaggattaaagtaattggaagcagtatatagaaactgtttcattaagtaataaagtttgaaacaatgattaaatactgttacaatctttatttgtatcatatgtaattttgagagctttaaaatcttactattctttatgatacctc

SEQ ID NO: 3207 - DNA, 200 bp, synthetic construct
  source 1..200: mol_type = other DNA
gtcatttatatacaaaagaaattctcaaatgttaaaataaaggaatagtttattgcttaatataacttatcatcactttgcttctttactgaatcttctacactcttgcctgatacctaaatttaatgtttgtttttaactcaaaaaatgtactgtagtatggaaaatggatagcagtagaataaagtcttaagattatt

SEQ ID NO: 3208 - DNA, 200 bp, synthetic construct
  source 1..200: mol_type = other DNA
ggtctaccttctgcttccctggaaaggatgaatttacatcatttgacaagcctattttcaagttatttgttgtttgtttgcttgtttttgtttttgcagctaaaataaaaatttcaaatacaattttagttcttacaagataatgtcttaattttgtaccaattcaggtagaagtagaggcctaccttgaattaagggtt

SEQ ID NO: 3209 - DNA, 200 bp, synthetic construct
  source 1..200: mol_type = other DNA
aagttctctaccattgaatcagtgaactagaaagatctgatttggcctgggaccagtgttcaagttggtttggtctttattaaaaatcacaatattccgaaaacaaaaaaacctaggagataaatgtagaggtattgacttttcgtatcttttatcttcacactgaaacaagagctatcctatttgattattaaagtgag

SEQ ID NO: 3210 - DNA, 200 bp, synthetic construct
  source 1..200: mol_type = other DNA
ttccaatggctcctttctgacctgctttcatgttttaatgtttgtttaatttaataggaaacctcattttaaatataacactcaaaaaaatgtaaatcatattgtagtattcaatagttaataaaaactcgagaaatgtgttgtttctgatgtgaaatttccaaaggaactttaattattgcaagttcaagcaatgaact

SEQ ID NO: 3211 - DNA, 200 bp, synthetic construct
  source 1..200: mol_type = other DNA
ccaattaaatcagtatgttcagtttctgaagcagttcttcctgcttcgtcttttgctacctttgtcttttggagggaaagcaatggatgggatatgttaaaagaaacattaattacattggcagttttcatttatacattgttgacataattttactcttaatacacacttgtatttattttaacgtctgaagttgaata

SEQ ID NO: 3212 - DNA, 200 bp, synthetic construct
  source 1..200: mol_type = other DNA
aacatgcaaaatatggagcttttcatgtaattactcttttactgtttaccattcactataattcacaattaaaattgtgtgactaaacaatgtctttcgtgcctttttgcccttcactttgttgttttccaactgcaaaatagatgcttccaaacatggtgattgaagtagacttgtattggggtagctgcctggtttac

SEQ ID NO: 3213 - DNA, 200 bp, synthetic construct
  source 1..200: mol_type = other DNA
agacaatgaagaacagttgaaacatgcaaaatatggagcttttcatgtaattactcttttactgtttaccattcactataattcacaattaaaattgtgtgactaaacaatgtctttcgtgcctttttgcccttcactttgttgttttccaactgcaaaatagatgcttccaaacatggtgattgaagtagacttgtatt

SEQ ID NO: 3214 - DNA, 200 bp, synthetic construct
  source 1..200: mol_type = other DNA
gagtcttccgaacacttgctatctcttgctgctgctgtttcatggaaggagatattaaacatttgtttaatttttatttaagtgttatacctatttcagcaaataaaatatttcattgcttatattaatccttattttttcaatttcaatatgatcacttacagtttccatcataatttttttttgcaacatagccattt

SEQ ID NO: 3215 - DNA, 200 bp, synthetic construct; identical to SEQ ID NO: 2800
  source 1..200: mol_type = other DNA

SEQ ID NO: 3216 - DNA, 200 bp, synthetic construct
  source 1..200: mol_type = other DNA
gtgcatgcatggggccacctttgcaacataaccgaaagaataaatgttttgttctgtagcctcgtgcctgtcacacacattactaagggctttgggtactggggccacctctgggctggggccgaggagcgagaagtaaaagcgggaacagggagtgggaaccatgtgagtccatcaaggcccctggaaacctctgagct

SEQ ID NO: 3217 - DNA, 200 bp, synthetic construct; identical to SEQ ID NO: 2833
  source 1..200: mol_type = other DNA

SEQ ID NO: 3218 - DNA, 200 bp, synthetic construct
  source 1..200: mol_type = other DNA
gctctccacccagcccgctcctgacccttatcttcccagagtccaggccaggaaggcccgagatggagagcactaaattcacggctttcatgtttttatttaataaattaaaaagtatttgaagccacattgaagggaacgctctacgaataaatctctttacccagggctgtgggctgtgtgtgtccagctcacagatg

SEQ ID NO: 3219 - DNA, 200 bp, synthetic construct; identical to SEQ ID NO: 2807
  source 1..200: mol_type = other DNA

SEQ ID NO: 3220 - DNA, 200 bp, synthetic construct
  source 1..200: mol_type = other DNA
agaggacatccctgctgggctgctgtgcagagtataagattttggacttgttcatgtcccctctctccctataaatgatgtatttgtgacaccctatcttgtcaataaacagcattctgattagtttgtcttattttgttgctagtaactacgtatttgttttattccccttttcttcccttttggtagcaaaggacacc

SEQ ID NO: 3221 - DNA, 200 bp, synthetic construct
  source 1..200: mol_type = other DNA
gggtgggttgggcaacagcctgagagtggactcagtgttgattctctatcgtgatgcgaaattgatgcctgctgctctacagaaaatgccaacttggttttttaactcctctcaccctgttagctctgattaaaaacactgcaacccagctaacttgtccagcatatgttgaatgggagccaaagtgtagcaaatgctgc

SEQ ID NO: 3222 - DNA, 200 bp, synthetic construct
  source 1..200: mol_type = other DNA
gaagccttggaagatcgtttggaaaggattaatcgagaactgggttcagttcgcatgacgctaaagaaattccatgttttgcgcacctctgcaaatctttgagatttgtagccattaaattttgagtcatttttgtttgcactaatgtataattatgcagtcagaaaaggcaaactattttgtactgtttataagccttc

SEQ ID NO: 3223 - DNA, 200 bp, synthetic construct; identical to SEQ ID NO: 2788
  source 1..200: mol_type = other DNA

SEQ ID NO: 3224 - DNA, 200 bp, synthetic construct
  source 1..200: mol_type = other DNA
aaggcagtcgctgccttcaggtggtgctgccccagaaacttaaaatttagtcgaggcagtttcaattgttactgtggaccgaattaggatcacaataaacgataatgcaggttcttcaatggtgactttaatctctcagaacaattgctgttgctttgaaagacatgcatagccagatgttttttaaattttcgtgtgtg

SEQ ID NO: 3225 - DNA, 200 bp, synthetic construct
  source 1..200: mol_type = other DNA
ttacagacggtgacataacacaggaaggaaccctgtcacattcctctttttgtattttcgtagtagatttaaaagttataatctcttcccctccccccaaactggagctgtccctggcctggttttcaaaataaagtgtgcgatcttcattattgtttccttagggagggcgtccctagagctcagtcttctgccaacct

SEQ ID NO: 3226 - DNA, 200 bp, synthetic construct
  source 1..200: mol_type = other DNA
cgatcctcatgtgatcatgaagtaacagtaactgactttttatgttaaaaaatgtacatttactgtggattctgtttaatttattgtgtatgtgtggggaaaagattagattctaaaataaaagtttaccctgtggcatcttcatttttatattctttgaaatgcaatgatagctctcatttataattcactaccctgtc

SEQ ID NO: 3227 - DNA, 200 bp, synthetic construct
  source 1..200: mol_type = other DNA
gttgtttgcagtcttcagttgtgttcttatgcttcagtgtcacatttcatttcatttgaaactaaaattttaagtaaagctgaaataaacttcttgtcattgtctgccttttgataattttaaagaaataactttccataagtaaaaaattatatatctctttggatataaatgatttttaaaagatgtttatttaaaaa

SEQ ID NO: 3228 - DNA, 200 bp, synthetic construct; identical to SEQ ID NO: 2837
  source 1..200: mol_type = other DNA

SEQ ID NO: 3229 - DNA, 200 bp, synthetic construct
  source 1..200: mol_type = other DNA
atactaacttattattatttatgattatataaatgaaatggacctatatcaagaggcagactgaagcttggaaatcattatgaatatttgtaaattacagctttaagaacacattacacataaatatatgttttgtaattaatcgaagtcacatttcctgacctaagaatttattttaggtttcctgtaaagtacaatcc

SEQ ID NO: 3230 - DNA, 200 bp, synthetic construct
  source 1..200: mol_type = other DNA
ttcagagtctgcttcaatcagcagatgaagaagccattgctgaacttttggatgaacaccttaaatcagcaaaataaatactaacttattattatttatgattatataaatgaaatggacctatatcaagaggcagactgaagcttggaaatcattatgaatatttgtaaattacagctttaagaacacattacacataa

SEQ ID NO: 3231 - DNA, 200 bp, synthetic construct
  source 1..200: mol_type = other DNA
taaattaatttgctctcatcgtattgtgtatattcacctaatgcccattgtgtattgatattgcattcttgaattttgaacactgaatatctttttgaaagattatacttctttacctctttgtgctttagaaattattttccttcaagtgttcaagtctaatgaagaatgaagataacattttatcacttctgtcctta

SEQ ID NO: 3232 - DNA, 200 bp, synthetic construct
  source 1..200: mol_type = other DNA
ttgtcaataatggaaacaccaaaaactgtattatttgcaactaaattttctctgccatacactaactcaaaaattttgatattttcattaacttgatgattaaactttatgtgagttaaactttgccttaacctgtgttttatgttatttttgctccaggttaaaggtgcaatgctttcctcctcttttcttgtgaagga

SEQ ID NO: 3233 - DNA, 200 bp, synthetic construct
  source 1..200: mol_type = other DNA
gggccttaatgtcacccaccagaaaactaactccaaataaacgcttaccctttcctttaggtttctttgttttgtttttgagcaaaagagatcggtagtgttgtgtgtaggccattcttctggagagccacaagcaggaagagcagcgctgtgttgcagaatggagtttccatggatttctaccagaccactgaaggagt

SEQ ID NO: 3234 - DNA, 200 bp, synthetic construct
  source 1..200: mol_type = other DNA
ataggaaacaagactttaaattttaaaaaaggaagttttatagtgaatgggtataaaaacaaatttgtggcatttttagtctaatgcatgttttcatccactatccagtactgattattaaaatgacatgtatttatcagagaattcactgacgtgtggcttaatacatgtaaatctagacctctgacatcatggtgttt

SEQ ID NO: 3235 - DNA, 200 bp, synthetic construct
  source 1..200: mol_type = other DNA
ggatggagcacagccatgaacctgctcacgacaagacgcacccatgcttctcagggtcaaggctttatgttaaagcttcctgtcggggctgctaggtcagcattaaagtaaggcaaccaacagtgtcccactggcgtctgtttgttagtaactgagcctaaacactcactgcgttctgtggctacagactcaccgtcgat

SEQ ID NO: 3236 - DNA, 200 bp, synthetic construct
  source 1..200: mol_type = other DNA
atcccactcaaggcctggtttgtctctcgattgccgccttgccctggcttctcccgccctgttgaggtgggaaggtgaagtgtctgtctggaacaccagcttccgcccttcccagctaggctggggattcctccagggaatattctagtctgtgggggcaggatggaggctccagggatgatactgtgccatgactgcca

SEQ ID NO: 3237 - DNA, 200 bp, synthetic construct
  source 1..200: mol_type = other DNA
aacagagtcccgccttaagagtctggatcgcacacctttgcaacagatgtgttctgattctctgaacctacaaaatagttatacatagtggaataaagaaggtaaaccatctgttatgtctttttttttcttttccaataaacttttattttggactaatttttgatttacagaaaaatggcagagatagtacagagagc

SEQ ID NO: 3238 - DNA, 200 bp, synthetic construct
  source 1..200: mol_type = other DNA
tgttgatattaaataaaccagagatctgatcttcaagcaagaaaataagcagtgttgtacttgtgaattttgtgatattttatgtaataaaaactgtacaggtctaccactggcttcttcgggctttatttctccaagaacatatttcttctgacattagtagatctccatttccaggacagaaattactcattgctctg

SEQ ID NO: 3239 - DNA, 200 bp, synthetic construct
  source 1..200: mol_type = other DNA
gaggatgtgtaacaagtattttcttctatcgtgcctgccagggctgaagctgcctggtatccaggaggggaatgctggtatccccatatgtctgtgtttgtttgagatttttaataataaataataaatttttgaagaatggaagtggattttgtgattcttaaaaagtgtagaagctgggcacggtggcatgtgtctgc

SEQ ID NO: 3240 - DNA, 200 bp, synthetic construct
  source 1..200: mol_type = other DNA
ggtggaaagggctaccctggggctctgaccacactgtagtatgtgtggagggtgccctcccgactcccacaacttctgctataacaataaactgtagaggaatctgagtaccgttattattctttgtctaggtgtgcctgcatcatgctcctcttcctatcttctccctgtccacgactcatattctcttctcaaagtga

SEQ ID NO: 3241 - DNA, 200 bp, synthetic construct
  source 1..200: mol_type = other DNA
gaggagcttcatctcagcctgctagccccctgaccctgcatgtttaacaccagggagcttggaaaacaataaacatctgtgtgtgcagcagccaaaatctctgtctgtgagggacagatgagcctactagtgtagagagagggagaagaggcagcacaggagggtgggttctccaccacacacccttcgctctgcttagc

SEQ ID NO: 3242 - DNA, 200 bp, synthetic construct
  source 1..200: mol_type = other DNA
aagcacttccttacagagctaagaatccatagccatggctctgtaagctaaacctgaagagtgatatttgtacaatagctttcttctttatttaaataaacatttgtattgtagttgggattctgaagtccattctggctctgctacttaacagtgtataatcttgtgcaactcatctctcagtattatatgtgaaatgg

SEQ ID NO: 3243 - DNA, 200 bp, synthetic construct; identical to SEQ ID NO: 2789
  source 1..200: mol_type = other DNA

SEQ ID NO: 3244 - DNA, 200 bp, synthetic construct; identical to SEQ ID NO: 2725
  source 1..200: mol_type = other DNA

SEQ ID NO: 3245 - DNA, 200 bp, synthetic construct
  source 1..200: mol_type = other DNA
aatctacagccaagaataactctggcttccgccatgccccatgtctcagaaataggtggccatggggcttcacaaaataatgagatgctctgtgcagtctgagaaagcaaatttgcctcttttcttaacacagtctctactggggaagcagaacactggtgggataaaaacttatctagaaggggagaaactccctccac

SEQ ID NO: 3246 - DNA, 200 bp, synthetic construct
  source 1..200: mol_type = other DNA
aaaagtgtgtattaggaggagagagaggaaaaaaagaggaaagaaggaaaaaaaaaagaattaaaaaaaaaaaaaagaaaaacagaagatgaccttgatggaaaaaaaatattttttaaaaaaaagatatactgtggaaggggggagaatcccataactaactgctgaggagggacctgctttggggagtaggggaaggc

SEQ ID NO: 3247 - DNA, 200 bp, synthetic construct
  source 1..200: mol_type = other DNA
ctttgccacatcttgatctgctcagccctggaggtgccagcaaagccccatgctggagcctgtgtaacagctccttgggaggaagcagaataaagcaattttccttgaagccgagatcctgactccagactcttcttcactgccctgaggacccggggatggggtctggactaggggaggtggaaatgcaggggagtggg

SEQ ID NO: 3248 - DNA, 200 bp, synthetic construct
  source 1..200: mol_type = other DNA
agaaataaaaaccatcgggcctggctgtggctcctctcatcatttggttgggtccttgaaagggtgggaagagggtctggtagtcactagggttccccagccattccttgctctcatcaaccttgaatgtccttccttatgcttgacctccatccctccagctgtcctttcagtctcctagtttttgcagacttcaggct

SEQ ID NO: 3249 - DNA, 200 bp, synthetic construct
  source 1..200: mol_type = other DNA
gccagggccagcggggcccggttccaataaagagtcttgggctgatgggcagtggtataactatatttattgtgcctgagaggcaaggtgagggaaaaatctcaacagaagcaagtttggggaaaatctggagtccccagtaaaaagcaggaaggtctctgctgtactcatcacagaatgggagagagggctctcaatag

SEQ ID NO: 3250 - DNA, 200 bp, synthetic construct
  source 1..200: mol_type = other DNA
agccctctctcccattctgtgatgagtacagcagagtccttcctgctttttactggggactccagattttccccaaacttgcttctgttgagatttttccctcaccttgcctctcaggcacaataaatatagttataccactgcccatcagcccaagtctctttattggaaccgggccccgctggccctggctcaggcat

SEQ ID NO: 3251 - DNA, 200 bp, synthetic construct
  source 1..200: mol_type = other DNA
acccgggactagaaggaaaataaatgatctatatgttgtgtggattcccttctggcgtgtgtcattcattcaaaaagcatttattgagtggcacctatgtccagcctgaagatgaatgtggtgggaaggggtgggtgtcacaaagacaaagatgacttagatgcccactgtaatcttgactgtgagaaagaggggattca

SEQ ID NO: 3252 - DNA, 200 bp, synthetic construct
  source 1..200: mol_type = other DNA
agctgacagaagaggtacccttgggacagagtatcccccgcaggcggaagtagctgagggcaagggtcccgatgagggtcccatggcctgctccctcaggaacagctccagcaccaataaagaggcatcttaccacccaggcttcttggtggtccttcttcctggtgccaccatctaggggcaccagggaaagagcgggg

SEQ ID NO: 3253 - DNA, 200 bp, synthetic construct
  source 1..200: mol_type = other DNA
tgagggcaagggtcccgatgagggtcccatggcctgctccctcaggaacagctccagcaccaataaagaggcatcttaccacccaggcttcttggtggtccttcttcctggtgccaccatctaggggcaccagggaaagagcggggtgaacagagctttgctgaaaagggccccctgcaacctagtgcctgaccctccct

SEQ ID NO: 3254 - DNA, 200 bp, synthetic construct
  source 1..200: mol_type = other DNA
aatggctgagggagggggctaagagaggagcaaagcaggaggtcttgggctaaaaatcttttttaccaaaaataaatctaagtctgatttagtttcatcaactagggtcaaagacattcttttctcaaggcaatcttatagcagggaacactgctggagtaagagatagatttctgcccagagcctgtaaccaataatct

SEQ ID NO: 3255 - DNA, 200 bp, synthetic construct; identical to SEQ ID NO: 2796
  source 1..200: mol_type = other DNA

SEQ ID NO: 3256 - DNA, 200 bp, synthetic construct
  source 1..200: mol_type = other DNA
gattgcactcgccttctaagaacctcaataaagagtctctggggtgtctggagcccattgatgtctgaagctgctgatatagctggggatcaccttctcattgcccttcagtgggaattcttcttcttcccaggccaattttagtgcgagtgtgtgtgtgaatgtgtgtgcacatgcctgcacacatgcatgcatgtgag

SEQ ID NO: 3257 - DNA, 200 bp, synthetic construct
  source 1..200: mol_type = other DNA
cagcaggcatgagtctaaccttcctctgggcctgaccatctctgggacagaggcaagaatccccaaggggtgggcagtcggggttgcaggactgtaataaatggatctctggtgtaaatatgactgaagtcttatttattcactgaaccatcttcaatatgcaacaacactgctccaggcagccgtctgctgtcagttct

SEQ ID NO: 3258 - DNA, 200 bp, synthetic construct; identical to SEQ ID NO: 2857
  source 1..200: mol_type = other DNA

SEQ ID NO: 3259 - DNA, 200 bp, synthetic construct; identical to SEQ ID NO: 2711
  source 1..200: mol_type = other DNA

SEQ ID NO: 3260 - DNA, 200 bp, synthetic construct
  source 1..200: mol_type = other DNA
ggatttgacacgataagcctcatctgatggaagagaggaataaataattcacctatatgtgtttgaggttgtgacagacttataaaatctttttaaaaaataaagctataatttatattaagttctgtggtttttctcttattacagtgttttacttgaacacattttaaataccattttgattacaacatttactgtta

SEQ ID NO: 3261 - DNA, 200 bp, synthetic construct
  source 1..200: mol_type = other DNA
ggaagagaggaataaataattcacctatatgtgtttgaggttgtgacagacttataaaatctttttaaaaaataaagctataatttatattaagttctgtggtttttctcttattacagtgttttacttgaacacattttaaataccattttgattacaacatttactgttaatatccaagtctattatttcttctcata

SEQ ID NO: 3262 - DNA, 200 bp, synthetic construct
  source 1..200: mol_type = other DNA
cttggttaagcacctctcctttgcccttcaccctgactcctgtcactgtctccatccccaaataaagctgaaatatttttttaagttagctgccgagaaaacattttgcatgaaggataaagttctgttaaaatacatccttaaaaaaagtttttcctatgcattgcctatgctttaaatcaacaaactcttcatttcta

SEQ ID NO: 3263 - DNA, 200 bp, synthetic construct; identical to SEQ ID NO: 2730
  source 1..200: mol_type = other DNA

SEQ ID NO: 3264 - DNA, 200 bp, synthetic construct
  source 1..200: mol_type = other DNA
ctgcctctcgctcctcaacccctcccctccatccctggccccctccctggatgacattaaagaagggttgagctggtccctgcctgcatgtgactgtaaatccctcccatgttttctctgagtctccctttgcctgctgaggctgtatgtgggctccaggtaacagtgctgtcttcgggccccctgaactgtgttcatgg

SEQ ID NO: 3265 - DNA, 200 bp, synthetic construct
  source 1..200: mol_type = other DNA
ccatggtgggaggccaggagttatcttatctcatcctggaccaaacagataggccagaaccagcctgcatcctggggctgctatgtggttcagttaatcagtgtgccaagattctaataaagttgaccttgggttctgtgaacactaaggagcaatccttacaagggaggaacagcttctagccactcattcacaattgt

SEQ ID NO: 3266 - DNA, 200 bp, synthetic construct
  source 1..200: mol_type = other DNA
aggagaattcctgcttgccacagaccccgaacatggcttggggttgaacatgttccatcttcctgagatggaagtcacaggcacatttcagtttagtctctccctgtcaccacctccctagacagcccgaatgagcaaaactgcaagttctagaagtcctgtgccccatttcctccctgcccattcaaatgctgggatgc

SEQ ID NO: 3267 - DNA, 200 bp, synthetic construct
  source 1..200: mol_type = other DNA
ccagtgattatgatgtaaattaagtagcaattaaagtgttttcctgaacactgatggaaatgtatagaataatatttaggcaataacgtctgcatcttctaaatcatgaaattaaagtctgaggacgagagcacgcctgggagcgaaagctggccttttttctacgaatgcactacattaaagatgtgcaacctatgcgc

SEQ ID NO: 3268 - DNA, 200 bp, synthetic construct
  source 1..200: mol_type = other DNA
ccagatttacttggagtacatgtgaaagaaaacgtcagtctgcctgtaaatttcagcaagccgtgttagatggggagcgtggaacgtcactgtacacttgtataagtaccgtttacttcatggcatgaataaatggatctgtgagatgcactgctacctggtactgctttcagtgtgttccccctcagcccctccggcgt

SEQ ID NO: 3269 - DNA, 200 bp, synthetic construct; identical to SEQ ID NO: 2811
  source 1..200: mol_type = other DNA

SEQ ID NO: 3270 - DNA, 200 bp, synthetic construct
  source 1..200: mol_type = other DNA
gaaaggtgtaattaaaggttaatctgtgattgttatgaagtgaatttgaatatcatcagaatgtgtctgaaaaaacattgtcctcaaataatgttctttaaaggcaatctttttaaagatttcactaatttggaccaagaaattacttttcttgtatttaaacaaacaatggtagctcactaaaatgacctcagcacatg

SEQ ID NO: 3271 - DNA, 200 bp, synthetic construct
  source 1..200: mol_type = other DNA
atactgttgatccatctcagtcactttttcccctgcaatgcgtcttgtgaaattgtgtagagtgtttgtgagctttttgttccctcattctgcattaataatagctaataataaatgcatagagcaattaaactgtgaggtactgttgtatatatttttttgcctgttgattttgatgagatcttaagttactgtggatg

SEQ ID NO: 3272 - DNA, 200 bp, synthetic construct; identical to SEQ ID NO: 2839
  source 1..200: mol_type = other DNA

SEQ ID NO: 3273 - DNA, 200 bp, synthetic construct
  source 1..200: mol_type = other DNA
ccccagctccagccatccacccctcagcccttttcttcaacgtcaccaataaattttttttttttttaagattttacctctatcccatacataggtataaggtgctgggctctgccgcagagcgctccacccaggcctggcgcccctcccaggaagtgggcagacccccagggaaacgctccgcagggtgagagtcccag

SEQ ID NO: 3274 - DNA, 200 bp, synthetic construct
  source 1..200: mol_type = other DNA
tcagtggaatagggctggttactttgggctgtccaactcataagtttggctgcattttgaaaaaagctgatctaaataaaggcatgtgtatggctggtccccttgtgttttgttgtctcacatttagatatcagccatgcatgactgaatggcttccaatcatatactcacctatcacctacaagagaacaatgaaaaac

SEQ ID NO: 3275 - DNA, 200 bp, synthetic construct
  source 1..200: mol_type = other DNA
gagtcataatattatacaaattcagagtgttattaaagaggtattgaaatattttaccagtctcactggattctcttctcaatttttggggaactatggaataatgaaaagaggatgcgcaaatcaaattccattctttcagtatcctaaatggatttcactggaggctttcaaggtatcattcttctctggggtctttt

SEQ ID NO: 3276 - DNA, 200 bp, synthetic construct
  source 1..200: mol_type = other DNA
agtatgaaatatgaaaacattttatatattttattgtacagttataaatatgtaaacatgagttattttgattgaaatgaatcgatttgcttttgtgtaattttaattgtaataaaacaatttaaaagcaagtctctatgtttaagaaatctacttttccggccaggcgcggtggctcatgcctgtaatcccagcacttc

SEQ ID NO: 3277 - DNA, 200 bp, synthetic construct
  source 1..200: mol_type = other DNA
aatggatgttctcaggttgtatttatttcggacaaataaactagagaattgtgtaaaaactgtgcctcctgcctcctctctctccccctctcacttgtgcatgtgcacacacgtgtttgtttaggccacagtggctgagatcacacccttctgtgaggtggtcttagtatcactggtcgtttgaaaagctgagttatctg

SEQ ID NO: 3278 - DNA, 200 bp, synthetic construct
  source 1..200: mol_type = other DNA
aagaaagatttagatggcttcttgccagtttgagcctaatctgattcttacagttttaccttcttgaaccaatgtaaaagtttttttaatgttaaatgattaaattctcagtgaggctatcttccttttccccagtaacattcctgaatttactgttatcttattgtagtacttgcatgacatggattcctgatatctga

SEQ ID NO: 3279 - DNA, 200 bp, synthetic construct
  source 1..200: mol_type = other DNA
ccgttagcactgactgccagtatctgttttatcttgctggtgctgaacattctttgtgcaactccatggtctttctgggccttactgtgctggtataattaaaataaaatatattttgttctattggtaggtttttttttaaaattagatgaatatgttagtctttttcaatatcagtttgaatcttattttctgtatgt

SEQ ID NO: 3280 - DNA, 200 bp, synthetic construct
  source 1..200: mol_type = other DNA
gggccggggagggggccgggggcggtgggcacatagagctataaataaatatatatatatatatatatatatatatatttaaacaaatgaagtcataataaaatttaaaaatgctaaggatctggccccacaggccccaaagctttcacagagctcctcttagacatgaagatgcccattggcctcctaggtcccaggag

SEQ ID NO: 3281 - DNA, 200 bp, synthetic construct; identical to SEQ ID NO: 2817
  source 1..200: mol_type = other DNA

SEQ ID NO: 3282 - DNA, 200 bp, synthetic construct
  source 1..200: mol_type = other DNA
gtgacagtttcctgaggagaggggtgtatccaggcttacctcccagcaggagtggtaccatatggtgtttatgtactactctatagaactcttggcttgcacttctacagctctgtacatttataagaataaatgcaatcacactagttgagctgtgtctgtgttgcagtggattttaaaggccttggccaggcacaatg

SEQ ID NO: 3283 - DNA, 200 bp, synthetic construct
  source 1..200: mol_type = other DNA
gtccctggggctggggttttgtttgtagaaggctctggggactcctaatttctgcttccccagcctaaagcagggatcagtcttttcttgtggaataaatccttggatcgggaaccctgctgctcagtccccttagggcccatcctcacgcttggggtgggggtgggaagtctggggtgggatggcttcccaggtatttg

SEQ ID NO: 3284 - DNA, 200 bp, synthetic construct
  source 1..200: mol_type = other DNA
tagctaactaactggtagaccagagtattacatcatcttattttggttttataccaataaaacatagcgtggaactcattcaggtaatgttttgcatttcattgcttttggatgaacaaaggaagtaaactaatcctttataaatgaaaacccagaatagttggtatgtcagctagtcattcctgtcatattcccagtag

SEQ ID NO: 3285 - DNA, 200 bp, synthetic construct
  source 1..200: mol_type = other DNA
taactaactggtagaccagagtattacatcatcttattttggttttataccaataaaacatagcgtggaactcattcaggtaatgttttgcatttcattgcttttggatgaacaaaggaagtaaactaatcctttataaatgaaaacccagaatagttggtatgtcagctagtcattcctgtcatattcccagtagaatg

SEQ ID NO: 3286 - DNA, 200 bp, synthetic construct
  source 1..200: mol_type = other DNA
ataaacaactttgatgatgtaacttgaccttccagagttacagaaattttgtccctatttaatgaataaattgtatgtatttttctctatatgccatttttgtcttcagttttggagtctggctggaaattcagccaaagggtaaaagctcaacacaggatccaggcaattaattatgggatgatgaccaggaaggcggt

SEQ ID NO: 3287 - DNA, 200 bp, synthetic construct
  source 1..200: mol_type = other DNA
ctacctactactggtggattcttttccttatagtgaatttaaaagtatcatcaagggtttaatattgggaaaatttctttttgccacattatctctgtttattcactttcaataaagttgatccatataaatattttaaagaggatgttagagaacatgttttccaagtgtgtttttaattggttctggttcaaggcaag

SEQ ID NO: 3288 - DNA, 200 bp, synthetic construct
  source 1..200: mol_type = other DNA
caagatggcaaaccaagtatgctcagataagcttttttcataattcaggaataaagtagtccatagaaatgtttctgtttcatatcatttggggcgagtcaggcaaaagtatttgatttgactttatagttttccacagcacaatgagcaaaagacaaacctcgtgggaagatgacactggggcagcccttcctattatt

SEQ ID NO: 3289 - DNA, 200 bp, synthetic construct
  source 1..200: mol_type = other DNA
gctcaaatctctgttactccattactgtgatttctggctgggtcaccagaaatatcgctgatgcagacacagattatgttcctgctgtatttcctgcttccctgttgaattggtgaataaaaccttgctctttacatacaatgcctggtcctctcctttcacccgtcttttaggggatgggaggaaaagggggctggagg

SEQ ID NO: 3290 - DNA, 200 bp, synthetic construct
  source 1..200: mol_type = other DNA
caaagggcctgcccagacaagattttttaattgtttaaaaaccgaataaatgttttatttctagaaaactgtgccttagccagagctcctctaggtgatcaacccatgtctggagctagctcttcctccaggacacgagagctgggggcctgagtacgtagcgccaggcccggtgtggatgctggggagaatcatcagtg

SEQ ID NO: 3291 - DNA, 200 bp, synthetic construct
  source 1..200: mol_type = other DNA
ctggagcctcggtggccatgcttcttgccccttgggcctccccccagcccctcctccccttcctgcacccgtacccccgtggtctttgaataaagtctgagtgggcggcagcctgtgtgtgcctgagttttttccctcagcaaacgtgccaggcatgggcgtggacagcagctgggacacacatggctagaacctctctg

SEQ ID NO: 3292 - DNA, 200 bp, synthetic construct
  source 1..200: mol_type = other DNA
tgcccccgtgtcacccccgccatcactgctggacaggagccacccccttgggtaccagagggagctgtgcattgtgaataaagagtgagcttggttctggactctgtgtgcctggtccctcagcaaggctggcctgatgcagctctgcccagctgggggctccagggcaggaaggtggagcacgttcctgctctagccct

SEQ ID NO: 3293 - DNA, 200 bp, synthetic construct
  source 1..200: mol_type = other DNA
cactggcctggggacagctgctgctctgatgacctcttcagccaggagctgtatcgagggggaggcgcctggtccagccctggacagattgatttccagctgaataaattggcctagataccctcttacttcctcctactgaggagagggccacccctccctcacacgcacctctcctcgccagctgcctgctcgctgct

SEQ ID NO: 3294 - DNA, 200 bp, synthetic construct
  source 1..200: mol_type = other DNA
attctccacagtggcttccgactcaggctccaatggaccaaataaaagcgttttgttttgtaatcacgcctcctcctcctgctgttgccccgcgcagggccctgtggaagggcggggaggttgcaggtctgaggggtaggccctgcccaggcatcccgggcaggcggacgggtgggggcccctggagatggccgtggtgg

SEQ ID NO: 3295 - DNA, 200 bp, synthetic construct
  source 1..200: mol_type = other DNA
gccggaccttgtggacgacagccccacccagtctgtgctctcagccgctggccgaagggcccagcctgctcagaataaagcatgtcctgctgccggcttgctggtgtctgccccacctcctcctaggagcaccttgtgaggttgggtgggagtcggggtctcctgtggggtcaagggcttgggacgtcctgatccttgct

SEQ ID NO: 3296 - DNA, 200 bp, synthetic construct; identical to SEQ ID NO: 2721
  source 1..200: mol_type = other DNA

SEQ ID NO: 3297 - DNA, 200 bp, synthetic construct
  source 1..200: mol_type = other DNA
cggggcatctgctgggcttgcccgggcggccgcgtgcagaaccccgcctggtcttgtgcccgagtcgggcggaggctggaacttgagtcctcaataaaggaagtagagccgctgtcggcactgcgtgtcaccccatagcgcggcgggctcgccgtaggcccgcggggcagctggcgggcgggggctttcggcggggttgt

SEQ ID NO: 3298 - DNA, 200 bp, synthetic construct
  source 1..200: mol_type = other DNA
gcggcaccctggggatgctcagcaccttgattgacacccgctcgcctggccagagcgggctgcgtgcacatgctgggcagagaggaatatttaagaaataaagcttggacccagatttttccacaaacctcgaggttggagggtggaggcgctgtccccagggatgtggtaaccatatcagcgaactccactgggcactg

SEQ ID NO: 3299 - DNA, 200 bp, synthetic construct
  source 1..200: mol_type = other DNA
taaataaaagcagacccccggcctgcctgcctctgtgcctgcggccctcacaactgtcaccggtgcatccctgctgccctctccaggcatttgcctgctctctttcatcttttctttttcaaaggaaggaggccgggcgtgggtggctcacgcctgtaatcccagcactttgggaggctgaggtgggtggatcacctgag

SEQ ID NO: 3300 - DNA, 200 bp, synthetic construct
  source 1..200: mol_type = other DNA
gggtggtcagccagagctcatgggacagctagccaggcatggttggataggggcagggcactcattaaagtgcatcacagccagagcctgttgtgtctcagttgggtggtccccaggacactgcctgtggggacctgccctgcccctcttaggtttggagcagaagtggaggtgcccacagcaggtacccactggccccc

SEQ ID NO: 3301 - DNA, 200 bp, synthetic construct
  source 1..200: mol_type = other DNA
agcgtcccccgcccgcccgtggcgcctccgcgcctgacccaggaggagtggccgcgcgcttccaggagccgctcatagaccccgcctgccgtccggtcaataaaatccgcctgactcctgcgcccccgcatgcgaccccttcgtctgcttgtgtactttgccgtctagctcagggcgcagacaggcgcgcccacgccctg

SEQ ID NO: 3302 - DNA, 200 bp, synthetic construct
  source 1..200: mol_type = other DNA
tggccgcatggctctggccgaggtgccgctgtggccaccgtctgtgaagtggctttacgcttcaggaagccacgcctgttgaataaagctttggtgtgtttgcagatgggatctggctgatgtctgtccctgagggggcagagagcctgggaatcgcatacaaggatgtgttcgtacacacccgtgctcgcgtgtctgga

SEQ ID NO: 3303 - DNA, 200 bp, synthetic construct
  source 1..200: mol_type = other DNA
gccggggccctccctcctgcactggccttggacggtattgcctgtcagtgaaataaataaagtcctgaccccagtgcacagacatagaggcacagattgcagtcagacagctcttttattgactttgtctgcttggtgcgggggttgggggggtgtcgaggctctagaagcggccatgcccacagaagtggtacacagaa

SEQ ID NO: 3304 - DNA, 200 bp, synthetic construct
  source 1..200: mol_type = other DNA
gcccccgacctggcccagcctggcccgtccccaatccagtgggctggccaggccacctgcaccagggaggacagctgctggcagggactaataaacccttccacctggccatggtggtggtgttctctatggaccgaggccctgaaacgcgggcagggaggggcagagaacacactagcttgggggtgggcaccagcctc

SEQ ID NO: 3305 - DNA, 200 bp, synthetic construct
  source 1..200: mol_type = other DNA
agattgagtgtctttaatctgcagaataaaaaaaaagaaattgaaaaccagttacccaaattaataggtggggcttaagcatctgctcggctaagtggcttcaaagagtgtaattggagttaagcaaaggcattcattgttaaccttgtaagtacacgtttgggggacgattttgtttacagatgcttgtaatcgaagat

SEQ ID NO: 3306 - DNA, 200 bp, synthetic construct
  source 1..200: mol_type = other DNA
tcacggagggaagtggctgcccccttaacacacctttaataaacagtctacagacccagttcctgcatttctcatttttatttgacagaaaaagttgctcttgctgtacagattttaaaaaaccaaaatgcctttaagaaacatgaaaagttggggggaggggttcacaacctcatgggggacagtagggaccaactaat

SEQ ID NO: 3307 - DNA, 200 bp, synthetic construct
  source 1..200: mol_type = other DNA
cctacctgagcccatgcagcctggggccactgccaagtcaggccctggttctcttctgtcttgtttggtaataaacacattccagttgatgccttgcagggcattcttcaaaagcagtggcttcatggacagctcattctctcttgtgcagacagcctgtctgtgcccctggctcacacccacatctgttctgcaccata

SEQ ID NO: 3308 - DNA, 200 bp, synthetic construct
  source 1..200: mol_type = other DNA
gtggggtatggggccatccgagctgaggccatctgggtggtggtggctgatggtactggagtaactgagtcgggacgctgaatctgaatccaccaataaataaaggttctgcagaatcagtgcatccaggattggtccttggatctggggtacaaccaaagccttccctgctccttggagtcaaagtccccagtgctgca

SEQ ID NO: 3309 - DNA, 200 bp, synthetic construct
  source 1..200: mol_type = other DNA
ctctgacgacacccccagccagctcagggttttagagtgtttttcattttctttttttttttttttttacaataaagtttcaggcttttttaccatgctctttctttctatgaatgggggccaaatcggtggagtgatttatatattactctgtccgatcttgatacataaatacccagccccatccctgccctagaaaa

SEQ ID NO: 3310 - DNA, 200 bp, synthetic construct
  source 1..200: mol_type = other DNA
cagcccctccccacaccagttgaactgcaggaagagaggacccatcctgccacaggacccagaaaaaaagcccaacacacactcgggttaagaaatacctttaaatttaggtaaataaagctcaaggaggtggggctgtcatctgtggtgtcagtccttctggccccctggctgtcagtgtcgctccagggccttgacaa

SEQ ID NO: 3311 - DNA, 200 bp, synthetic construct; identical to SEQ ID NO: 2790
  source 1..200: mol_type = other DNA

SEQ ID NO: 3312 - DNA, 200 bp, synthetic construct
  source 1..200: mol_type = other DNA
cctgcccgcctcgcggccccttgtggggatcgggggcaccagaggggcagaggcaccaacatctgaataaagccattgttctcccagatggcttccaggagaagaggactctgcttccaggacttgggttggggtggtagttgtgtaccaacacaacagtaagtggttggggagggtccggggctgtaccaacacagcag

SEQ ID NO: 3313 - DNA, 200 bp, synthetic construct
  source 1..200: mol_type = other DNA
ccaccggcggatcccggggctgctgggcttcctgagtccccagcggctctcaacacacacctatgtaccagagcatctattaaatgtgagccttgctttttatgaaaagctgtgctttgaaaacaaaaggcattttgtaaatgacttctttgagctatccacaaataaaaaggctgggtgtcactctgttacccaggctg

SEQ ID NO: 3314 - DNA, 200 bp, synthetic construct
  source 1..200: mol_type = other DNA
ctttttaaatgatatgaagaaatcagaggtgaaaattgtacattgggaatatatttatgcaaattttattgaaatttattgtaaataaagattttctcagtggtctagaaaatcagcttgaatgtcattcagcatttattgaagaaggatgacatcccttccacttattgcacaaacttggtagctttgagtcaaataca

SEQ ID NO: 3315 - DNA, 200 bp, synthetic construct
  source 1..200: mol_type = other DNA
tgtagaaagacatttacatataagtctgtttaatttcaaaggagtttgtgaaaaaaaatccatggtgaaaatgaaacaatgacatggttaatctggaacttacgttcttataccaataaaaggtacctcaatacatgttctttcaatttctgttttgtttttttttttttaatttaatgtattaaagcattttgcagtgg

SEQ ID NO: 3316 - DNA, 200 bp, synthetic construct
  source 1..200: mol_type = other DNA
ggatgtaatacatatatttacaaataaaatgcctcatggactctggtgcttccacttggtcgttttgagcctttacagcagtgtagccacagcttctgcggcagcatgcagttgcttcgtttatcggtgaatgcgattccctgaagtgactaatacagccaagggaaaaagttcttatgaaaccagtatgcctaagaaac

SEQ ID NO: 3317 - DNA, 200 bp, synthetic construct
  source 1..200: mol_type = other DNA
gtgtgtccagttttgcctgtctataaaagatgatagtaatttaccaagtgacatttgcagagaaacaggtgtacagttatcgttgtacttttgtacaatgtgaattttgttaataaattataaggtttgtttttttttttttaaactctgcagtgttgatttttctctgggttgttttttctgccatgagtccaacaggt

SEQ ID NO: 3318 - DNA, 200 bp, synthetic construct
  source 1..200: mol_type = other DNA
ggtacattataaaacacacattaatgcatttaataaatatatattatctatcaaaagtgagccttagctcttcatcagttaataaaaagcacctgctgagaactcctgtaagctggtatcatcattgcatcattggattataaaagccacaatgctccctttcaacttggggtttggcctgaggcgttcaactcagcctt

SEQ ID NO: 3319 - DNA, 200 bp, synthetic construct; identical to SEQ ID NO: 2810
  source 1..200: mol_type = other DNA

SEQ ID NO: 3320 - DNA, 200 bp, synthetic construct
  source 1..200: mol_type = other DNA
gaggggttcctggagtcactgcagagggagtgtgcgaatcaagcctgaccaagaggctccagaataaagtatgatttgtgttcaatgcagagtctctattccaagccaagagaaaccctgagctgaaagagtgatcgcccactggggccaaatacggccacctccccgctccagctcctcaacttgccctgtttggagag

SEQ ID NO: 3321 - DNA, 200 bp, synthetic construct; identical to SEQ ID NO: 2836
  source 1..200: mol_type = other DNA

SEQ ID NO: 3322 - DNA, 200 bp, synthetic construct
  source 1..200: mol_type = other DNA
ccgcctcctcggggctccaggctggcttgcccgcgctctttcttccctcgtgacagtggtgtgtggtgtcgtctgtgaatgctaagtccatcaccctttccggcacactgccaaataaacagctatttaagggggagtcggccgtccgtgtcttgtggtgtctaatgcaggggagggcctggggaggtagcagagcccag

SEQ ID NO: 3323 - DNA, 200 bp, synthetic construct
  source 1..200: mol_type = other DNA
gtccagaagcctcgaggtctcctgtttctcttcctgaaaaataaatatttgcctttcgatcacatcgttgtgctgagggtgaggagtagaggggtgggtcctgaagatatgaagatggcagcttaggagggaacaggccagccctgaggctggagcctggggccctcaggagcctgacccactggttccactgcattcct

SEQ ID NO: 3324 - DNA, 200 bp, synthetic construct
  source 1..200: mol_type = other DNA
gcctgctgggggcccagtttggtgggcccttctttcctggactttgtggaggaggcaccaagtgtctcaggcagcgaggaaattggaggccatttttcagtcaatttccctttcccaataaaagcctttagttgtgtactggggccttggctgtgctgatggccagaagccaggggccttctccacagtccctttggact

SEQ ID NO: 3325 - DNA, 200 bp, synthetic construct
  source 1..200: mol_type = other DNA
ggcacccgcgggcctccgctgcccgacgcttctgttcggcccgacctccaccccggctcccaataaaatttaactgatctttgtttcttatgggcggcgccttcagagtgtctgcgcgagggcctcaggtgggagcgccccacaaatgaatggatgcggcctggaggcctgcgggggtcggccccacaatctacgcccgc

SEQ ID NO: 3326 - DNA, 200 bp, synthetic construct
  source 1..200: mol_type = other DNA
cagcctggcccctgctgtcggacctgagcctcctggctcccagcctgtaaatatgtatagacctgttttgtcatttttttaataaagtcagttctggtggccctggactttggaggggaaggggaggccaagagcggatgttcttcatttcacttcacacatgcacggcaagttgtgctcaaacattttaatcatttctg

SEQ ID NO: 3327 - DNA, 200 bp, synthetic construct
  source 1..200: mol_type = other DNA
tcagggacccagcccctcctctctgagaaactctgaccttcatgtccttaggctgtgctcctgccactctaccctgacacctcaataaagaccagtgctggttttgttggacttcctggcttctctttcatggtctgtcctgacatgtggaggcactcggtccctttccttccgccctccttcttagatatgctcttgga

SEQ ID NO: 3328 - DNA, 200 bp, synthetic construct
  source 1..200: mol_type = other DNA
aaggcacccctccgtgtggagcacgtggagatagtgccaggtggctcagtgccacctatgcctgtggtgaagtgtggctggtgtccccttcccctgctgaccttggaggaatgacaataaatcccatgaacagcatgagccaaggactggtctcttcttaaaggggggaaggatgtggagcagtgggggagcctattcca

SEQ ID NO: 3329 - DNA, 200 bp, synthetic construct; identical to SEQ ID NO: 2823
  source 1..200: mol_type = other DNA

SEQ ID NO: 3330 - DNA, 200 bp, synthetic construct
  source 1..200: mol_type = other DNA
tttctccgtccctacacagggagctcctccccaagggtagatcggaccgttcatgctgcctataggcattatgtccctcaaaaaaaaactcctttgcctgcatcctgtgtacaacatgacatttttaaccaatccaatctaaaaatgtgccagaatccacctgtggcccgaatcgtgtttggttcctctttctactccac

SEQ ID NO: 3331 - DNA, 200 bp, synthetic construct
  source 1..200: mol_type = other DNA
tccaggcctggtgtcacatgacaccagcatgcattgcaggattattagtgtattttgagtctgtaaaaataataaatatgtttgaagtagtttcccattgtgtagttagtttccttatcaatcatgataggtatccaggaccccagagggagtcaggttaagttatggcagccaggagtcctgtgttctggcgctgccac

SEQ ID NO: 3332 - DNA, 200 bp, synthetic construct
  source 1..200: mol_type = other DNA
ctctggaaaggaggctgactcccaggctgccggacggtgccacctcaggtcccctggccagacagaggacttatggtggcaccagccatctccccaggagttcagcctaactagaaataaacctaatgctcccttagagtcacacgcaattgtctctgtctgtgtgtgttgcacagcctgggagagggtcagggccacag

SEQ ID NO: 3333 - DNA, 200 bp, synthetic construct
  source 1..200: mol_type = other DNA
agtaagcaagcaccttaagtagtgtgttaatgattgaaactgtaattgccttcgggttgtgctttagtctgtaaaattctaaaggagagctgctaaattgttttcttaataaacatttttctcatttgtaataatgtagtcttgttctttgtggggaggggaaaggagtcagtcattttcctagaaaatgaatcctatcc

SEQ ID NO: 3334 - DNA, 200 bp, synthetic construct
  source 1..200: mol_type = other DNA
cccctcagcctgcatactggtatcctggtcccagctcctgccagggctgttaccgttgttttcttgaatcactcacaatgagaaactaacattttgctttttgtaataaagttaatttatattcagttcccagcatgccttggtgtctttcatcttggtggagtcatttggagtttgagggggggatggtggtagtaagt

SEQ ID NO: 3335 - DNA, 200 bp, synthetic construct
  source 1..200: mol_type = other DNA
gcctggcctttgacccctcagcctgcatactggtatcctggtcccagctcctgccagggctgttaccgttgttttcttgaatcactcacaatgagaaactaacattttgctttttgtaataaagttaatttatattcagttcccagcatgccttggtgtctttcatcttggtggagtcatttggagtttgagggggggat

SEQ ID NO: 3336 - DNA, 200 bp, synthetic construct
  source 1..200: mol_type = other DNA
acctgggatgctgctggagctgaatcggatgccaccaaggctcggtccagcccagtaccgctggaagtgaataaactccggagggtcggacgggacctgggctctctccacgattctggctgtttgcccaggaacttagggtgggtacctctgagtcccagggacctgggcaggcccaagcccaccacgagcatcatcca

SEQ ID NO: 3337 - DNA, 200 bp, synthetic construct; identical to SEQ ID NO: 2802
  source 1..200: mol_type = other DNA

SEQ ID NO: 3338 - DNA, 200 bp, synthetic construct
  source 1..200: mol_type = other DNA
ctggccaacgtcagggtcggggctagggtaggggcaaggaaactcgaataaaggatgggaccaaccccaaggctgtggttatttcaaacgtggccgtcaaaggagggagggttcatggagggggtgggagtgtcaccaagccaagaaaccacacatactcttatcccagggcctgggctaccctatcataggaggcacat

SEQ ID NO: 3339 - DNA, 200 bp, synthetic construct
  source 1..200: mol_type = other DNA
gacgtcacgcaggacagataccgctccacactctgcttcctttgagttttttaataaaataatctcatgcggcaggagaggagaggatcagggattggggccgccgcctctttggtctgtggctggggagggtgggctccgctcagggctggagggctctgtgggctgtgggggcagaggctcggttccaaggccagatc

SEQ ID NO: 3340 - DNA, 200 bp, synthetic construct
  source 1..200: mol_type = other DNA
tggatgcacagccagggtctgagccaactccgatgtgagtcgtcacgcaggacagataccgctccacactctgcttcctttgagttttttaataaaataatctcatgcggcaggagaggagaggatcagggattggggccgccgcctctttggtctgtggctggggagggtgggctccgctcagggctggagggctctgt

SEQ ID NO: 3341 - DNA, 200 bp, synthetic construct
  source 1..200: mol_type = other DNA
cctctcctctcctgccgcatgagattattttattaaaaaactcaaaggaagcagagtgtggagcggtatctgtcctgcgtgacgactcacatcggagttggctcagaccctggctgtgcatccatcagaaagtgcaaggcccaggccatgagctggggaggaagcctggaaagaaaccaccgctgcaggtcaatggagcc

SEQ ID NO: 3342 - DNA, 200 bp, synthetic construct
  source 1..200: mol_type = other DNA
agtcaggatgaagccccatgccactccacactgctgggacatggcagggacttcacagtgggggtttttagctggctcacagggctccctcagcctggggaacattaaaggttttctacaaatacagtcatggtccttgtgtgtcccagttccagcctcctccctggtctcaccagcttgccttctgctctggactaagg

SEQ ID NO: 3343 - DNA, 200 bp, synthetic construct
  source 1..200: mol_type = other DNA
tggccaggcttcaacactttccctgtccccacctggggactcttgcccccacatatttctccaggtctcctccccacccccccagcatcaataaagtgtcataaacagaatattctgcattttggtgcatgtcctggggccagccaggcagggactgattcccccccacaactccccagcacagtctggagaatggcatg

SEQ ID NO: 3344 - DNA, 200 bp, synthetic construct
  source 1..200: mol_type = other DNA
gctgaggcttagagcttggaacaagggggaataaacccagaaaatacagttaaacagatggctgtgtcattcttgagtggaatggggtgggcaggcagccagcagggctctgtagctaaggcgtccctgcaggggccattacctaccatagctctagtgtctggcctaagagatgcccttcacccataacctcaggcacc

SEQ ID NO: 3345 - DNA, 200 bp, synthetic construct
  source 1..200: mol_type = other DNA
cccagacagtgaagccactaaccctggagctagtggaggaaactgtgcaggctatggaggtggagtaagctgaggcttagagcttggaacaagggggaataaacccagaaaatacagttaaacagatggctgtgtcattcttgagtggaatggggtgggcaggcagccagcagggctctgtagctaaggcgtccctgcag

SEQ ID NO: 3346 - DNA, 200 bp, synthetic construct
  source 1..200: mol_type = other DNA
cacagtcggtccccgcagaggtcactgtggcaaagcctcacaaagccccctctcctagttcattcacaagcatatgctgagaataaacatgttacacatggagccaggtgcacatgtccttccttctccctagcgggattgggggcaggtgggctcttggtcagtgagggatcttgtggtctagccacagctgctcaagg

SEQ ID NO: 3347 - DNA, 200 bp, synthetic construct
  source 1..200: mol_type = other DNA
tgacccagttagtcctgccagatgtcactgtagcaagccacagacaccccacaaagttcccctgttgtgcaggcacaaatatttcctgaaataaatgttttggacatagaaacagacctgagtttccttctctgcaatggggactggtggcatcgactcccagtgctggtggttggtgggggatccttcatttcagccac

SEQ ID NO: 3348 - DNA, 200 bp, synthetic construct
  source 1..200: mol_type = other DNA
acagggcactgtctgtgtccttccttgaactgtctaccctgttgcttttcacaaatcatggtaataaaacaagttattcttgaggactagtcattataaatgttttcttccaaaataatggacagtcatttcccttcattgaatgaaaatgaatggaaattccaaatgaggtatttgtattggggataatgtgctcagta

SEQ ID NO: 3349 - DNA, 200 bp, synthetic construct; identical to SEQ ID NO: 2722
  source 1..200: mol_type = other DNA

SEQ ID NO: 3350 - DNA, 200 bp, synthetic construct
  source 1..200: mol_type = other DNA
gcccgcagctcctgccacccctgccttaagatttcccattaaatgcatctgtttagaagccctgactgcactgcctgtgtctgtgtggcccaggggaggtgggcttgaagttgtccttgtcacccacaaaggggcagcactaccgttccctttccaggctgcagttaatgttggcaacccagccttctcaggaagctgag

SEQ ID NO: 3351 - DNA, 200 bp, synthetic construct
  source 1..200: mol_type = other DNA
ctcccccgcgctcgcgacgaggaggatcccgagccgccggtggctgcccctgacgccctctaggccagcaggacccgcccgttcccgaccttccctcgagtcccgccaagaaataaaggcgatgatttccgaccatgctcgcgttctccgcggagtctgtgctacaccgtggagcggggcggggcgtgctgggatctcga

SEQ ID NO: 3352 - DNA, 200 bp, synthetic construct; identical to SEQ ID NO: 2793
  source 1..200: mol_type = other DNA

SEQ ID NO: 3353 - DNA, 200 bp, synthetic construct
  source 1..200: mol_type = other DNA
caatggaagccctcaaagaagtcggaatgtcatagtcttgaaatgaaagggaaactgggaaactgggtttctcattaaagttgtttcccactctgtattctctgtgaaattcattgattgaatagtactttgtagtgagaaggctggagaatagcaacagcctcatggagaatgttaattgagttcctactatgcaccag

SEQ ID NO: 3354 - DNA, 200 bp, synthetic construct
  source 1..200: mol_type = other DNA
agatgctggcctgcgcctgcacctgcgcctggctctgtcaccgccatgcaactccatgcctatttactggaaacctgttatgccaaacagttgtaccactgctaataaatgaccagtttacctgaaaccctttgtgatcagttctttaatgatacctaaatgaaagctaattaaaacaataggtttctcccaagggtctg

SEQ ID NO: 3355 - DNA, 200 bp, synthetic construct
  source 1..200: mol_type = other DNA
cctcgccccggacctgccctcccgccaggtgcacccacctgcaataaatgcagcgaagccgggagcgcgtgagcctctgcctggggccggtgggcggggctggggtagcgatggttcccgaggcctgggcaggcaccccgtttcctgccagccgggccgcattccagtttcattaacatcagcatcgccttccttctcag

SEQ ID NO: 3356 - DNA, 200 bp, synthetic construct; identical to SEQ ID NO: 2771
  source 1..200: mol_type = other DNA

SEQ ID NO: 3357 - DNA, 200 bp, synthetic construct
  source 1..200: mol_type = other DNA
caagcacctttgcatggcactcgctactccctgcgataggcgactcgggaacagccgcctcaccctgtgagaagccgaggccccttctccagtgctctcggggaggttgcaccaggcccaccccaccctgtgagaaactgcagcccccttctccagtgctttcggggagggtgcaccaggcccgccccaccttgtgagaa

SEQ ID NO: 3358 - DNA, 200 bp, synthetic construct
  source 1..200: mol_type = other DNA
cggaagacatgatgcagagcaagcctctgtgattcctgcccagcacctgtgaggcctgacgtgtcagttcccaataaatgctcttctgatttgtttcccgtacaggcaaggaggcttgggtagtgcagatttgtgtatttcaatctttgaaagctctgatgtaatttagaaatgaaatccaatcatgagtccaggtagag

SEQ ID NO: 3359 - DNA, 200 bp, synthetic construct
  source 1..200: mol_type = other DNA
gcaatggcagcagataaaagtgacgagtggtttgccaaacacaataaacccaaagcttcaggttaacggaagacatgatgcagagcaagcctctgtgattcctgcccagcacctgtgaggcctgacgtgtcagttcccaataaatgctcttctgatttgtttcccgtacaggcaaggaggcttgggtagtgcagatttgt

SEQ ID NO: 3360 - DNA, 200 bp, synthetic construct; identical to SEQ ID NO: 2735
  source 1..200: mol_type = other DNA

SEQ ID NO: 3361 - DNA, 200 bp, synthetic construct
  source 1..200: mol_type = other DNA
atcccagtttaatattccaataccctagaagaaaacccgagggacagcagattccacaggacacgaaggctgcccctgtaaggtttcaatgcatacaataaaagagctttatccctaacttctgttacttcgttcctcctcctattttgagctatgcgaaatatcatatgaagagaaacagctcttgaggaatttggtgg

SEQ ID NO: 3362 - DNA, 200 bp, synthetic construct
  source 1..200: mol_type = other DNA
aggagcagtttggcttccggaaggaagaggaggcaacactcggacctggttcttgtacaacaagaaaacatcgctggggccccgctgaggctggagtgggggtggaggctggtctttggaggatgccacccccaccccatcctcttgtcaggccctcggggtaccccagagcttggtgggtgagtattccacctgcttac

SEQ ID NO: 3363 - DNA, 200 bp, synthetic construct
  source 1..200: mol_type = other DNA
ccatcttctgcaccccactctttgtttccaataaagttatgtccttagatagcgactgctgcttctgccttttgccacacctgggtccccagccagaagctcaagtgtctgctgggcttttcagggtgtccatagtattccccagatgtctccatagctgtcctctttttgacgatccagagaggaacaactgacattgg

SEQ ID NO: 3364 - DNA, 200 bp, synthetic construct
  source 1..200: mol_type = other DNA
tgctgataccctagtagtccccagctcccaaacactgaaaggaaaacgtgaaaacactcaaggcctagggggaggacaggttggtaaaacatgaaaaggtaaataaaattacttgtttgaaaccactgagtcatggatcttttgattacacgctcataattgggccattaaactgggaacgaagagaaagatttttttgt

SEQ ID NO: 3365 - DNA, 200 bp, synthetic construct
  source 1..200: mol_type = other DNA
acggcgccgccgccgccgctctctcccgggccaggaggctagtcccacctcttgctattaaagcttctctgagttgactttggtctcgcctgtttatttcatttatttatttattaatttatttatttgagtcggagtatcgctctgtcccccaggctggagtgcagtggctcactcggctcactgcaagctctgcctcc

SEQ ID NO: 3366 - DNA, 200 bp, synthetic construct
  source 1..200: mol_type = other DNA
tcctgggattctagtatgcaataagagatgccctgtactgatgcaaaatttaataaagtttgtcacagagaatctttgtactttggggttcttttttttttgacttcaagtccgaatttgtctggcccattcctatttgtaaaaaccattgcactgaactcagagcaagttggagaggagatgaaaggagtttatgaatg

SEQ ID NO: 3367 - DNA, 200 bp, synthetic construct
  source 1..200: mol_type = other DNA
gccacttctggcttcagcccccaccaggggaaggaaggagggcacattaactccctccaccagcctgctgacagacactaactttgtatccgttcaataagcatttcataaataaaggtgtagaaaaggttcatgcgtcttccttggaggaactaactgctcgttccagcctcccgttcctgcccacacggggcaccagt

SEQ ID NO: 3368 - DNA, 200 bp, synthetic construct
  source 1..200: mol_type = other DNA
aagctggaggctccaggactccactggacagacccaggtcttccagacctgcttcctgaaataaacactggtgccaaccaagacagctgtgtgcttctttgtgggagctaggggatgctggtttctgggctgagctggggaaaacaggaggtggcgagatgggggcggggaggggaggcaaatagatatgtaacctgcta

SEQ ID NO: 3369 - DNA, 200 bp, synthetic construct
  source 1..200: mol_type = other DNA
attttaggatggcaatcatgtcttgatgtcctgatttgttctagtatcaataaactgtatacttgctttgaattcatgttagcaataaatgatgttaaaaaaactggcatgtgtctaaacaatagagtgctattaaaatgcccatgaacctttagtttgcctgtaatacatggatatttttaagatataaagaagtcttc

SEQ ID NO: 3370 - DNA, 200 bp, synthetic construct; identical to SEQ ID NO: 2773
  source 1..200: mol_type = other DNA

SEQ ID NO: 3371 - DNA, 200 bp, synthetic construct
  source 1..200: mol_type = other DNA
ccatcagattatatcttcaacaccacaccccccaccccatcgtgggtgagggtatcccctgtgtgtcccaggccaataaaatctacctgccactgcccctggctgctgctgtttgtgttgcctcccacccaactgtctggaataggtcaaggttgcttggagggtggggggatggctggcaggtccacagcaagtcaaag

SEQ ID NO: 3372 - DNA, 200 bp, synthetic construct
  source 1..200: mol_type = other DNA
tggaaaaaaataaaaaggagagaggaggtgatctgtggtggtgctggggtgccagggcccacacagcacctagaagctgtggctgtgaagagaatgctctccctagccacagggccctgagccctgaggaccctcattaaccttttgccccacaggcctgtccctgtcctcagcctttcctaggcccttctgggttccaa

SEQ ID NO: 3373 - DNA, 200 bp, synthetic construct; identical to SEQ ID NO: 2727
  source 1..200: mol_type = other DNA

SEQ ID NO: 3374 - DNA, 200 bp, synthetic construct; identical to SEQ ID NO: 2770
  source 1..200: mol_type = other DNA

SEQ ID NO: 3375 - DNA, 200 bp, synthetic construct
  source 1..200: mol_type = other DNA
cggaagggagtggagatggggctggttcctgctgcagtgaggggaacagatgggacaataaagactggagtctcagttgaataatacaaaactgtttaatactaccaaaaatataattgtatgttgtgcggctctccctggctatcatgggaggactgcaggctgcctctgaactgtagtccaacaggagaaagggttga

SEQ ID NO: 3376 - DNA, 200 bp, synthetic construct
  source 1..200: mol_type = other DNA
tggcctttgggcacaaggtcagaggctggatgtggaccaggccctgaacagaagccatgagatctggactcacagctgcccccagagcccaggcaatggcactgacgcttcccattaaagctccacctaagaaccccctttgaaagttactgattattcatttattcaacaaatattcactgtgcactagcaatgtacca

SEQ ID NO: 3377 - DNA, 200 bp, synthetic construct
  source 1..200: mol_type = other DNA
gctccacctaagaaccccctttgaaagttactgattattcatttattcaacaaatattcactgtgcactagcaatgtaccaggcactgtgccaagtattgagttgtcttaatgagcaaaaacactctggttcctaccctcttggtgcccacagtcccatagggaagcagacatccatcaaaggctaactaataagtggat

SEQ ID NO: 3378 - DNA, 200 bp, synthetic construct
  source 1..200: mol_type = other DNA
ccacgatggcgcttacctttcagacttcattaaacttatgaccgaatgggcctgtgtctgtgtgtagctgggatgccggtgcaggatagcacaccccatccctagaggaaagggctcatctgaagtcgggagcaccctcaaccctcctctcccaaccaagatgtccaggggtgccaaaggttctctcaagttcaggggta

SEQ ID NO: 3379 - DNA, 200 bp, synthetic construct
  source 1..200: mol_type = other DNA
gagcgcgcttcccgactctcctctccccattctgtgccctactattttcaacaaaacaaaacaaacaagcaaaaaacacaaaaacctcagagtccaaaacaccaaacaaacaaaaaaacaaaaaaccttcctttccctgggtctggctgtgaatgcgcgcggcaagttactggggcgctggcggcagggctggcgccgcg

SEQ ID NO: 3380 - DNA, 200 bp, synthetic construct
  source 1..200: mol_type = other DNA
agtaatcttatatacaagctttgattaaaacttgaaacaaagagcctgtgttttgtgtgtggtgatttaggacactccctagttttcagtggatcagtctcttacctctgatttgttggtctaaaatttttctgaaatcaggactgatgagattttttttatagtgggcagcagcatttgaggatatatcagaagctgga

SEQ ID NO: 3381 - DNA, 200 bp, synthetic construct
  source 1..200: mol_type = other DNA
gaagatgcaggaataaagtaatcttatatacaagctttgattaaaacttgaaacaaagagcctgtgttttgtgtgtggtgatttaggacactccctagttttcagtggatcagtctcttacctctgatttgttggtctaaaatttttctgaaatcaggactgatgagattttttttatagtgggcagcagcatttgagga

SEQ ID NO: 3382 - DNA, 200 bp, synthetic construct
  source 1..200: mol_type = other DNA
aactggacaaagaccgcaaaaagatcctcgaacggaaagccaaatctcgccaagtaggaaaggaaaagggcaaatacaaggaagaaaccattgagaagatgcaggaataaagtaatcttatatacaagctttgattaaaacttgaaacaaagagcctgtgttttgtgtgtggtgatttaggacactccctagttttcagt

SEQ ID NO: 3383 - DNA, 200 bp, synthetic construct
  source 1..200: mol_type = other DNA
tggcagtaaagagtccaccagcagtgacacctgccaatgacagatgcaagcccaacacccttttggtacgcaaaacctgctctcaataaattcccccaaagctctgacctcttgtgcattgcttcagtaaagacttaaagctccggccgggcgcggtggctcacgcctgtaatcccagcactttgggaggccacggcggg

SEQ ID NO: 3384 - DNA, 200 bp, synthetic construct
  source 1..200: mol_type = other DNA
tcatgtcctgatgccatggaatgactgaagacaggcacaaaatgtgacatctttggtcatttccctctgtaattattgtgtattctaccctgttgcaaaggaaataaagcatagggtagtttgcaaacaatatccttagactggtcttgtcttttctctttcctgaagccatgtcaaagtttgaatagtcaccagagttg

SEQ ID NO: 3385 - DNA, 200 bp, synthetic construct
  source 1..200: mol_type = other DNA
gccagcccttctggagcaggacagaagatatgcaaaatgtatattttcttgattcctgaccattgatacttaatgtccatgtgactctttttcacatgcaataaactttgctttgtttcaatctggggccgctttgctgtatttgttttcctcttccccatgcagaaatggttcctagtttgatggtttgtatgctcgga

SEQ ID NO: 3386 - DNA, 200 bp, synthetic construct
  source 1..200: mol_type = other DNA
ctaatttattttaacttgatagaaaatgagctttgtgtttgtccctcctaaacaaaaaaataaaaatcctctgtctcattgtttagtattcagcttgcataacaaaatgtatttatagtttcagtgtgtgatggttgataaaatactcagaaatgttattttggatcatgtatccattgtaagttagaaacaaaccaggg

SEQ ID NO: 3387 - DNA, 200 bp, synthetic construct
  source 1..200: mol_type = other DNA
ggaccccaccgggtgtggttttgatacccctaagttaaggctgagccagagcactgtctcagcatttgaaccgaatgctaatatagtcacttattaaaggattatgctgatggaaatgtaccaacctcctgtctcggaaagccttttgtttgcatccaaaccttaattttctattatttactaggcgtctgggttatggg

SEQ ID NO: 3388 - DNA, 200 bp, synthetic construct
  source 1..200: mol_type = other DNA
gagtcagagcccacatggccgggccctctgtagctccctcctcccatctccttcccccagcccaataaaggtcccttagccccgagtttaaaattattgttctgactggggtagacacatccctgtctgggtaaaggagaggaagctggactgtcagaatgggttggtgagggggacagagaagggacagagaagggcct

SEQ ID NO: 3389 - DNA, 200 bp, synthetic construct
  source 1..200: mol_type = other DNA
gaaactgaaagccagaatctgcttcacctctttttacctgcaatacccccttaccccaataccaagaccaactggcatagagccaactgagataaatgctatttaaataaagtgtatttaatgaatttctccaagcttacggaatcttactttttgggtgagagggggcggatgatgaagtcagggaagaagcagcttgg

SEQ ID NO: 3390 - DNA, 200 bp, synthetic construct
  source 1..200: mol_type = other DNA
tgggcggccaaggggagaaaaggagccgcttctgcctcccttgccaaaactccgtttctaattaaattatttttagtagactctggagttgagcttgtgcatctgccgcacagagtctcccacccggaccctcgtcctaggccatggaggtggtgtttgaggcagcccgcccccgctggccaacctgtccctggacatgg

SEQ ID NO: 3391 - DNA, 200 bp, synthetic construct
  source 1..200: mol_type = other DNA
atggacggaaccatgcacagcaggctgggaaatgtggtttggttcctgacctaggcttgggaagacaagccagcgaataaaggatggttgaacgtgaatatggctctcagctctcagtgtgtctgcaggtgccatgtcagagccagagcacctccgttttccctcacctcacctgtccgcttgggctgggtttccagtgg

SEQ ID NO: 3392 - DNA, 200 bp, synthetic construct
  source 1..200: mol_type = other DNA
tgattgaattcaaaatcaacccttctagaagatgaaatttagtacactttacatctgactactattgtgtagcctgagccattctgaatttctacacaataaatgcagtttatgtcttttgggtcttaatagtctcaaaaatatttcatcaaggtataaagaacacaataaatacttttacagtaaaggaataatattta

SEQ ID NO: 3393 - DNA, 200 bp, synthetic construct
  source 1..200: mol_type = other DNA
gagaaggacaaaatcaccaccaggacactgaaggcccgaatggactaaccctgttcccagagcccacttttttttctttttttgaaataaaatagcctgtctttcactcctgcttttgtctttgatgctttcctgcagatctctgccctagctgggcagctacagccagccactcaagtgtgtgtggcctggccctcggc

SEQ ID NO: 3394 - DNA, 200 bp, synthetic construct
  source 1..200: mol_type = other DNA
cctgttcccagagcccacttttttttctttttttgaaataaaatagcctgtctttcactcctgcttttgtctttgatgctttcctgcagatctctgccctagctgggcagctacagccagccactcaagtgtgtgtggcctggccctcggcttgctttctggctcgtgctctactccatcagtgcgtgccagtggggaca

SEQ ID NO: 3395 - DNA, 200 bp, synthetic construct; identical to SEQ ID NO: 2824
  source 1..200: mol_type = other DNA

SEQ ID NO: 3396 - DNA, 200 bp, synthetic construct
  source 1..200: mol_type = other DNA
ggctgtacctggtgccctgtggcccccacccacctggattccctgttctttgaagtggcacctaataaagaaataataccctgccgctgcggtcagtgctgtgtgtggctctcctgggaagcagcaagggcccagagatctgagtgtccgggtaggggagtcattcaccctaggctttttttccagaagcttccttgagg

SEQ ID NO: 3397 - DNA, 200 bp, synthetic construct
  source 1..200: mol_type = other DNA
ggcagcaggctctggggcttctgctgtcctttggagggtgtcttctgggtagagggatgggaaggaagggacccttacccccggctcttctcctgacctgccaataaaaatttatggtccaagggaggaaggacgtttggtttattatttcagcccatggagagaataggtcgttcggtttgttatttgagcccatggag

SEQ ID NO: 3398 - DNA, 200 bp, synthetic construct
  source 1..200: mol_type = other DNA
aatcctagaaccaagcttcagagcctagccacctcccaccccactccagccctgtcccctgaaaaactgatcaaaaataaactagtttccagtggatcaatggactgtgtcagtgttgtagggcagaggagggggactcatctgggggtgaagttgtggcagggagaagagctgagtgcctcttaggggcagggaccctg

SEQ ID NO: 3399 - DNA, 200 bp, synthetic construct
  source 1..200: mol_type = other DNA
cctcttcatttagctaataaaaagtctaagcaataagaattaattctttttttaaaaaaatgcagtgtttaaactttgaagagtactggaaaatgttcaacttaagagagccaatggctggatgaatgagggagtaggagggatggaagaaagcaattatatccgacagtgcataaataagaaaaaaaagtcacacagta

SEQ ID NO: 3400 - DNA, 200 bp, synthetic construct
  source 1..200: mol_type = other DNA
gtcgttcttcgggccctgtcctggcccaggcctctgccctctgcccacccagcgtcagcccccagaaaaaaggcaataaagacgagtctccattcgtgtgactggtctctgttcctgtgcggtcgcgtcctgcccatccggggtggcaaagcgtcttgcggaggacagctgggcctggaagcccggctgtcgggcaccag

SEQ ID NO: 3401 - DNA, 200 bp, synthetic construct
  source 1..200: mol_type = other DNA
cttttttccttagggggaggtttgccttaaaggcttttaattttgttttgtttgcaaacatgttttaaattaaattcgggtaatattaaacagtacatgtttacaataccaaaaaagaaaaaatccacaaaagccactttattttaaaatatcatgtgacagatactttccagagctacaacatgccatctatagttgcc

SEQ ID NO: 3402 - DNA, 200 bp, synthetic construct
  source 1..200: mol_type = other DNA
gggcttagggcactcacctcctgtttccacaggaatcttttggtcaataaaatagattgactcagaatggttgcgctaccacttgtatttatatgactaattcgtactgtatactccattgtgcttgtgtggttactttccgtttataaatagataattttctaatttagttcatgcactgtaatgtttagaaggtggtg

SEQ ID NO: 3403 - DNA, 200 bp, synthetic construct
  source 1..200: mol_type = other DNA
cgccccggcccccatccctctgggcttcaccattgtgattttgtttattttttctattaaaaacaaaaagtcacacattcaacaaggtgtgccgtgtgggtctctcagccttgcccctcctgctcctctacgctgcctcaggcccccagccctgtggcttccacctcagctctagaagcctgctccctctgcagggggtg

SEQ ID NO: 3404 - DNA, 200 bp, synthetic construct
  source 1..200: mol_type = other DNA
tgctgtgtacacaatgtacagcgattacgtcaagaggatggcacaggatgctggagagaagtaggactcctataggagccggggctgtccaactcccctaactcaatccctggtacattcctaataaagcagttttgaggaaaatcaacagactctttttcactgggggagaacagagtaagggactggtggtagctggg

SEQ ID NO: 3405 - DNA, 200 bp, synthetic construct
  source 1..200: mol_type = other DNA
actcctataggagccggggctgtccaactcccctaactcaatccctggtacattcctaataaagcagttttgaggaaaatcaacagactctttttcactgggggagaacagagtaagggactggtggtagctggggagaggacttggagtaaatggctggaaatcaaagtgctctggccccctactccagggcaaggaag

SEQ ID NO: 3406 - DNA, 200 bp, synthetic construct
  source 1..200: mol_type = other DNA
ctagacagaaccaataaagcctccagtgctggccgtcggcttagacttttgtgcaaatgcccctgggccagggagccctcctggctgctgtgtcctcgtctgttttttagggatgccaccccattttttagctgccccagctccacctgcccccagagggcaatgccacccttgtcctggccacccatctctcacctgcc

SEQ ID NO: 3407 - DNA, 200 bp, synthetic construct
  source 1..200: mol_type = other DNA
ctcagtgccgccaggaaaagagaaagagaatccattattggtgaaaatccattttaagctgtcagcccccacaatcccagagaaatgactagacagaaccaataaagcctccagtgctggccgtcggcttagacttttgtgcaaatgcccctgggccagggagccctcctggctgctgtgtcctcgtctgttttttaggg

SEQ ID NO: 3408 - DNA, 200 bp, synthetic construct
  source 1..200: mol_type = other DNA
ctgcatgtggaagggcacacagcagcaggcagggaggaggcggaggtggcaaataaacctgggcaattttgtttatacaaaaaatagaaaaaaagttccaagtttttctttcttccctcattcttttatttttgaaaagtgccttcacgttgcatttttattggaggaaaacctcgctcgttcagtaagcataatctgat

SEQ ID NO: 3409 - DNA, 200 bp, synthetic construct
  source 1..200: mol_type = other DNA
agtgtgtggagtaaggacattcagaataaatatctgctgctctgctcaccaattgctgctggcagcctctcccgtcctcactggctctgtttccctttgtgctttctgggaggccccataggcagccagtgcctgccggcctgccctttggactcttggcattttgctgttttctcaaattctctggaagaaagagggaa

SEQ ID NO: 3410 - DNA, 200 bp, synthetic construct
  source 1..200: mol_type = other DNA
tgacctgatggtcctggctgatgagctcagccccataaagaatgtcgaggaggctttgcgcctctgcaggtgactctcgggcccaagcaaccttctggaaaacgggttaataaataaatcaataaagaaccttcaagtttctactacttccgtgtgcctctgtgtcttgcatgatggatcttggctaggtcagctcctga

SEQ ID NO: 3411 - DNA, 200 bp, synthetic construct
  source 1..200: mol_type = other DNA
aggtggacacaacagcagtctccttcagcacggcgtggtgtgtccctggacacagctcttcattccattgacttagaggcaacaggattgatcattcttttatagagcatatttgccaataaagcttttggaagccggacactgtctccttgtgcttatttgatactgagctgaaagaagtgacttggttctctggctat

SEQ ID NO: 3412 - DNA, 200 bp, synthetic construct
  source 1..200: mol_type = other DNA
aatattaacccagcctccttataataaaatcacaaagttatatctgttcccccttgtcccagtggagggtcaataaatcacatgatggctttggcaacaacccttcctagaactgtgtacaagtctgagaaaaagcaaagctccaagactatgtgcctgagcaataattattgaaacctagcaaaggcccaatggagaag

SEQ ID NO: 3413 - DNA, 200 bp, synthetic construct
  source 1..200: mol_type = other DNA
gtggactttgatatgacaacaacccctccatcacaagtgtttgaagcctgtcagattctaacaacaaaagctgaatttcttcacccaacttaaatgttcttgagatgaaaataaaacctattcccatgttctatggttggcagttgtcatcttgggcttaaaaacagtactgttggttaaatggtcttggtggttcaagt

SEQ ID NO: 3414 - DNA, 200 bp, synthetic construct
  source 1..200: mol_type = other DNA
tggacagcctttgtgtgtatctctccaataaagctctgtgggccaagtcctctaggactccagtctgttaatgagggctgtgctgttcaaggaccaggtccaggcaccaccaatagacaaaaggatttatttggaaatttccaaacctgccagatgtggcactcgccaagccctaggcccaccctcctcaccaagctcca

SEQ ID NO: 3415 - DNA, 200 bp, synthetic construct
  source 1..200: mol_type = other DNA
gtgcccgcgtggcatcctgtgaccgacccctccccagtgcctctcctggccctggaaggtgccactccagtgcccatcagccttgtcctaataaaattaagttgtatcatttcatctgactaggtgtcattctataatattatggggtggaaggtggtggtatggagcaaggggtaggtggaaagaagacctggagggcc

SEQ ID NO: 3416 - DNA, 200 bp, synthetic construct
  source 1..200: mol_type = other DNA
atttttatatttgtataataaatattcttctctcctaatttggttgtcttatgttcacttagatttatttctagcccctttgcacttataaagtggacatttgtggtgcttgctttcattcagtgtttatattttttatgtctttcattgtatcaggaatatgttcagctacaagaaacaaaaatctactatactggatt

SEQ ID NO: 3417 - DNA, 200 bp, synthetic construct
  source 1..200: mol_type = other DNA
ggtggttttcagattccacacaaaatgtcacacttgtttcttgttcatccaaggaacctaattgaaatttaaaaataaagctactgaatttattgccgcacccattgcagtgttagcttcatggtagcttacttttagttatgtcatttggttaagaaatgcaaatatttggaacgtcatcattctatggctgtgaagtt

SEQ ID NO: 3418 - DNA, 200 bp, synthetic construct
  source 1..200: mol_type = other DNA
gaccttcaaataggagtgattgaaataaataactacttgcatgttatgctttcatttgggtggaatacttcattggaataaactactgatcttgtgctgtgtcaaagtaacagactagaaccttctttcaagtacctgaattgaaatgaaactcattttgaataataaaaactctagaaactctttatcttctcatctta

SEQ ID NO: 3419 - DNA, 200 bp, synthetic construct; identical to SEQ ID NO: 2757
  source 1..200: mol_type = other DNA

SEQ ID NO: 3420 - DNA, 200 bp, synthetic construct
  source 1..200: mol_type = other DNA
aattgagtccaggaggaagctctggcccttgtattacacattctggacattaaaaataataattatacagttctgggtgtgcttcttctctgtggttgagataattaagcctctcttctgagctggcctcactggcagcggggtttttgtttaaatggaaaggtgagcctcgacaggtttgttgggctggttgtctgacg

SEQ ID NO: 3421 - DNA, 200 bp, synthetic construct; identical to SEQ ID NO: 2801
  source 1..200: mol_type = other DNA

SEQ ID NO: 3422 - DNA, 200 bp, synthetic construct
  source 1..200: mol_type = other DNA
gggggcaaggtccgtcctctgtgggcccaaacctatttgtaaccaaagagctgggagcagcacaaggacccagcctttgttctgcacttaataaatggttttgctactgctaggccctgccttgcccattcttctggggcctgagaggtgctcccctagggtaggggagcggttctgacatcccccattctctgacaccc

SEQ ID NO: 3423 - DNA, 200 bp, synthetic construct
  source 1..200: mol_type = other DNA
ggcacccccaggacagcacacggtgagggtgcggggcctgcaggccagtcccacggctctgtgcccggtgccatcttccatatccgggtgctcaataaacttgtgcctccaatgtggtacctgcctcctctagaggtgggtgtatgcttgggtgtcagagaatgggggatgtcagaaccgctcccctaccctaggggagc

SEQ ID NO: 3424 - DNA, 200 bp, synthetic construct
  source 1..200: mol_type = other DNA
tgtctggcatgtagtagatgctcaataaacacttgttgaatgaatgactccttttccatcctctctacccaaggattcccagaaccgctctcatttgtaagctggctgagtgggcaggcaggagaggggccggagcccctcgtcccaggattcctgttgagagggagccctggcctgggagaagggggctggaacagggt

SEQ ID NO: 3425 - DNA, 200 bp, synthetic construct
  source 1..200: mol_type = other DNA
agcacttagcgggcgcgctgggatgtcacagagttggagtcattgttgggggaccgtggggagagctttgcctgttaataaaacgcacaaaccatttcacacacagtgacagcgctgtttcgcgtttctcattgtcttgagattctgggaggaagcctctggggcttcacagaggggctccctaggggtaagtgcaggac

SEQ ID NO: 3426 - DNA, 200 bp, synthetic construct
  source 1..200: mol_type = other DNA
aaccttccaccgtttccttctcggaccatgaagggcaaaaacaaaaaaacaaaaaaaatcacaaaacaaaaaaaacaaaaaaagatgttaagatccaagcaacaaaaaaaaaaccaaccaaaccaagaggcatccaaccaagtccaagtcccgcgtcctggccacacgcccgcaccgagggagcacgccggcaggggcgc

SEQ ID NO: 3427 - DNA, 200 bp, synthetic construct
  source 1..200: mol_type = other DNA
gccgcgcccagaccagcctgtcgcgcattaaaaccgtgtctctcccgcagctgtgggtgggccccggggcgccgcttgggggtcctgcagctggaggtggaggaggcccacaattctccccaaaccagagagagcccagaacttcccagtgcccagggactcccgtctgggaggtggtcttgtggatgggccgggtgacc

SEQ ID NO: 3428 - DNA, 200 bp, synthetic construct
  source 1..200: mol_type = other DNA
cagcaagaggtgagagctgccagcctgaggtgcccactccgccagccacaggaccacctcctctgccagcaggaataaagacttgtgcatccctcaacgccttcctgtcatgcttcctccagaaaagggcccccgtcgtctgccctggctcagctggaccgcagtgtccaggcctgagagcctggtggaccatggtgtgg

SEQ ID NO: 3429 - DNA, 200 bp, synthetic construct
  source 1..200: mol_type = other DNA
agctgccagcctgaggtgcccactccgccagccacaggaccacctcctctgccagcaggaataaagacttgtgcatccctcaacgccttcctgtcatgcttcctccagaaaagggcccccgtcgtctgccctggctcagctggaccgcagtgtccaggcctgagagcctggtggaccatggtgtgggcccctgaggagcc

SEQ ID NO: 3430 - DNA, 200 bp, synthetic construct
  source 1..200: mol_type = other DNA
ctgaaggcctccctgagcacagggcccattaaaaccaggttcctccctggggcgtctgcttggccttagcgttgtttatctgtcctacttgggaaatgcagtatcaagtgcctgtgccagagcctggcctgcccgtgtcaccacccacagccatctgcacaccagtggtgttggggacagtgtggccttcctcagagcct

SEQ ID NO: 3431 - DNA, 200 bp, synthetic construct; identical to SEQ ID NO: 2761
  source 1..200: mol_type = other DNA

SEQ ID NO: 3432 - DNA, 200 bp, synthetic construct; identical to SEQ ID NO: 2755
  source 1..200: mol_type = other DNA

SEQ ID NO: 3433 - DNA, 200 bp, synthetic construct
  source 1..200: mol_type = other DNA
ttatattgaactgtaaatatgtcactagagaaataaaatatggacttccaatctacgtaaacttatttgtttattctgctctgtgtacatcctcatgctaaccgtagcaacttgcagctctaagtattatgtcataatgacagaggaccattttaaagtcttctatctatggctgtgaagacatcattatataatctagt

SEQ ID NO: 3434 - DNA, 200 bp, synthetic construct
  source 1..200: mol_type = other DNA
atcacttgctgtttttttatataaaaatgtgtacaaagttaatttattgcattaataaagctctttaaactataaaatgttataaagtgtatctacaacctcaactgtcactaaaaatatggtatagaacttgtgggatggcttactcctaaaaggagagtcagacagtgcattgattggcctttacagagtgtcagtga

SEQ ID NO: 3435 - DNA, 200 bp, synthetic construct
  source 1..200: mol_type = other DNA
ccagaaatgacgctgtctgggtcaacatttcagggaggagtctgccaccagtgtaatgtatcaataaacttcatgcaagcatacaattttgtattgcttttttttgtaatttaggaggactacaaccaaccaaccaaacacaaaaggcctatcaatcatctatcttttcagacttataaagcaatagcattttccaactc

SEQ ID NO: 3436 - DNA, 200 bp, synthetic construct
  source 1..200: mol_type = other DNA
aatgcatacaagtcagggtgtttggctaatctacaaataagtcttaaacctatgtttttaaatttttttcccttggtttctacttatcttttaaaaaaaaaaatgaaaaaacactcatgagataactgcatttcacccaacaaaagcagggtataaggcgatattggtgatgaaagtcttaggaaaaatgcataattttg

SEQ ID NO: 3437 - DNA, 200 bp, synthetic construct
  source 1..200: mol_type = other DNA
actcctgtggattcacatcaaataccagttcagttttgtcattgttctagtaaattagttccatttgtaaaagggttactctcatactccttatgtacagaaatcacatgaaaaataaaggttccataatgcatagttgttttctgtcatttgtgttattctttaaaaccaagatcaaattgagaaattggtaagcaaat

SEQ ID NO: 3438 - DNA, 200 bp, synthetic construct
  source 1..200: mol_type = other DNA
atgagaagcagttcctgggaccagattgaaatgaattctgttgaaaaagagaaaaactaatatatttgagatgttccattttctgtataaaagggaacagtgtggagatgtttttgtcttgtccaaataaaagattcaccagtaaagatggttttcttttgtggactctgatttgaatctgctcaatctctctgccaatt

SEQ ID NO: 3439 - DNA, 200 bp, synthetic construct
  source 1..200: mol_type = other DNA
cagtaggtggcaaattattgttgttatttagttgtttatttttgactggctttgttcttggtgttgaaaattaaaataaagcaaatctgcagagtgctgtgcaatgcctttcatctcacattagaaattatgatttatgggtcatttttaagttaatgtttgaaggattcagttatattttaaaaacaaaaataacagtg

SEQ ID NO: 3440 - DNA, 200 bp, synthetic construct; identical to SEQ ID NO: 2733
  source 1..200: mol_type = other DNA

SEQ ID NO: 3441 - DNA, 200 bp, synthetic construct
  source 1..200: mol_type = other DNA
caccccgtgagccttgtcagtgtgtaaataaagctcttttgccacccccaggagccactgtcttcaggaagggtgcacgccctgcgggtctcgggcaatcacacgcggccaggcttggcgccaatgctgtcgtttattgcgcggaatgggggtgtgggggttaatggggcgtggggggccacggtgggggcactgctgcc

SEQ ID NO: 3442 - DNA, 200 bp, synthetic construct
  source 1..200: mol_type = other DNA
gcggcagccgggccgtttgggctcaagacacacacacagcgcagtgagccgctgtcaacagacagtttattctatatacaaacacaattttgtacactgcaattaaatagaatggaatgagcgctcctccgcattcctccccgagtgactggtttggccgccggcccactccatccccgagtgggactggaccacggccc

SEQ ID NO: 3443 - DNA, 200 bp, synthetic construct
  source 1..200: mol_type = other DNA
cagacaaattagcctgctggatctttctgcgtaggggcttggggggcccttttgccaggggcccctccatgtcagggccagttgccgtcagctgccaggctgggggtgccatggaggtggcgtgttgttgccccctcttcctccaggctcggggggctgtgctggctgcagtgctggggtgcagtgagatctgggcccgt

SEQ ID NO: 3444 - DNA, 200 bp, synthetic construct
  source 1..200: mol_type = other DNA
tgcagccatgtctctgcagctggtgctgaccccatgccacctctagacccgtgcgtactggtgcagccagtgtgggggtgggtggcggagcagggctcaagccagcctcggttccccatctgcgaccatgcttgggttctccagccttgctcccaagtaaggaacccatcttcagctgcctgggatgaggccctgcctgt

SEQ ID NO: 3445 - DNA, 200 bp, synthetic construct; identical to SEQ ID NO: 2738
  source 1..200: mol_type = other DNA

SEQ ID NO: 3446 - DNA, 200 bp, synthetic construct
  source 1..200: mol_type = other DNA
ccctgcgccgcgcggactcctgccccgagggtccggacgcgccccagctcgcgccccttcccatatttattcggaccccaagcatcgccccaataaagaccagcaagcaaccggctggggtgtccgtgcgtgttagggggcccgtgggacctcccttgccgactctcctcgcgcacggcccgggtccgccctgtagcgct

SEQ ID NO: 3447 - DNA, 200 bp, synthetic construct
  source 1..200: mol_type = other DNA
gccggccccgcgccggagtccaggggccccttctggacgccccgcgactctggcgaaataaagcgagtgctgcggccgcagagtcacctgctcctttacgcctggacccggcaccaagtccggggcctgaaagacggtggtggggcgcttcaggcaggggagagtcagcgagcgctacagggcggacccgggccgtgcgc

SEQ ID NO: 3448 - DNA, 200 bp, synthetic construct
  source 1..200: mol_type = other DNA
ttcggacacaccagggaccagcgggctagtcccagggcatggcccagcggccagattctttttcccaggattaaaactctgaccccaggacccatgtgtctggcttggcttgggggattaggggacgaggggtccgtcagatgtctgcctacggatggccccatttactcccagtgaccctcagctcagtgaaatctacc

SEQ ID NO: 3449 - DNA, 200 bp, synthetic construct
  source 1..200: mol_type = other DNA
gatctagggcagggaggggggtgcaatgaggaatgtttctggtctgaaaagaataaagtgggtttgaaagcggattctcagcctcgctgctgttgggccacccgcctctgactggggttgggggacacccatccccatcaagcctaaggccaatccccgtttctgcgggcgggagagcgaggggtggtgagggctggggg

SEQ ID NO: 3450 - DNA, 200 bp, synthetic construct
  source 1..200: mol_type = other DNA
cgagtcagcaggggccgcctgccccggccagaacgggcagggctgccactgacctgaagactccggactgggaccccactccgagggcagctcccggccttgccggcccaataaaggacttcagaagtgttccctgacccgtgtgctggccccagggagcacagggttggcctggtggtgcccagagcaccgaggcctgg

SEQ ID NO: 3451 - DNA, 200 bp, synthetic construct
  source 1..200: mol_type = other DNA
agcacatttgacctttcagctccatgtccacgtgggggccttggggatggggagggggctggagatgcacgcctggcccctcaccccatcatcccgcggactggcaaggcagcgcccccggcctcacagtgaggcctcttagcaggggagccccggaatcacaggacaccctaaactccttgagtcccagccctggaaca

SEQ ID NO: 3452 - DNA, 200 bp, synthetic construct; identical to SEQ ID NO: 2767
  source 1..200: mol_type = other DNA

SEQ ID NO: 3453 - DNA, 200 bp, synthetic construct
  source 1..200: mol_type = other DNA
aactgaaaacaaaatgagaacaacaaaaaaaattgtatggcagtttttactttttatcgctcgtttttaacttcacaaataaatgataacaaaacctccccgtctgcgggtgctgtctgtctccccccctttccttccctccctgtagttttgaagcggatgtttgttctttatagatgttgtttaaaaagcctgataat

SEQ ID NO: 3454 - DNA, 200 bp, synthetic construct
  source 1..200: mol_type = other DNA
acctgcctctctgaggataaagcaattcattttctcccaccctcggccctcttgtttttaaaataaacttttaaaaaggaaaaaaaaaagtcactcttgctatttcttttttttagttagaggtggaacattccttggaccaggtgttgtattgcaggaccccttcccccagcagccaagccccctcttctctccctccc

SEQ ID NO: 3455 - DNA, 200 bp, synthetic construct
  source 1..200: mol_type = other DNA
ggtgcagcctgagtcaagaaacgtggactccagtctggccccttgtgggtcgtcctggctccagggcgaaatggtgaacatgtcacacaacaaggaataaagagatggtttttgctgaacgtgtctggatacttgggcctaggagtggaactgggtgcatgagatccctggacccagtaggggagctggggaccttgggc

SEQ ID NO: 3456 - DNA, 200 bp, synthetic construct
  source 1..200: mol_type = other DNA
gtttgcttttaaggatcggctccctgtcgcgcccgaggagggcctggacctttcgtgtcggacccttgggggcggggagtctgggtggggagggtgttgaataaaagggaaaataaatgtgtcgttttcatttttagcgggaggagcagtccttgcgttaagcggtgtgaggccctttaaggcgcggccacactcagcat

SEQ ID NO: 3457 - DNA, 200 bp, synthetic construct
  source 1..200: mol_type = other DNA
gggcctgaggcatcctgggtctcactcggcccccaaaaactgataaaagaataaaacacttaaatgaataacaaggaactgagtatatgtatatttcatcaggggaggggctaggactcccacttggaggcctcaggagttctgctgggcgtcgcgaaggagcttctcctcccgccgcttccgtaacctctctttgaatt

SEQ ID NO: 3458 - DNA, 200 bp, synthetic construct
  source 1..200: mol_type = other DNA
ctgaaggcactggacaagaagctggaggacattgccctgccctgacccctggccccgccccctacccctccctttccagagaaataaactcttcccgtcgctctgccagccagtgcctacctcaccttcttatcaagggagtccctgggagttgtgctgagccaggcctgtgccccaggccccaccaacccctattatcc

SEQ ID NO: 3459 - DNA, 200 bp, synthetic construct
  source 1..200: mol_type = other DNA
ccctggccccgccccctacccctccctttccagagaaataaactcttcccgtcgctctgccagccagtgcctacctcaccttcttatcaagggagtccctgggagttgtgctgagccaggcctgtgccccaggccccaccaacccctattatcctctcagaaggagaattagcctctccctgcccctgagggcatctcaa

SEQ ID NO: 3460 - DNA, 200 bp, synthetic construct
  source 1..200: mol_type = other DNA
ggggaccagggcttgtgtgggtcgagagcgccctcatggtgctggtgctgttgtgtgtaggtcccctggggacacaagcaggcgccaatggtatctgggcggagctcacagagttcttggaataaaagcaacctcagaacactttgttctttgttcttgtttgttttctttcttttttttctctttctttagttcacaga

SEQ ID NO: 3461 - DNA, 200 bp, synthetic construct
  source 1..200: mol_type = other DNA
ctggaacttgccggtgcctggggtgcctttcccccagccagggtccaaagaagcttggctggggcagaaataaaccatattggtcggacacagtctctgagccttccttgacgtgacccctgactggttcatgttggactaagagaacagtcttccaccttcgtgaagtcccaaaggcaactctcagttgtgtgttgtgg

SEQ ID NO: 3462 - DNA, 200 bp, synthetic construct; identical to SEQ ID NO: 2855
  source 1..200: mol_type = other DNA

SEQ ID NO: 3463 - DNA, 200 bp, synthetic construct
  source 1..200: mol_type = other DNA
tgctggaggcagactcgagggccgaattgtttctagttaggccacgctcctctgttcagtcgcaaaggtgaacactcatgcggcccagccatgggccctctgagcaactgtgcagcaccctttcacccccaattaaacccagaaccactgctctgctctcctgtgtctcatttctcctcagggaagcatagtggggaaga

SEQ ID NO: 3464 - DNA, 200 bp, synthetic construct; identical to SEQ ID NO: 2749
  source 1..200: mol_type = other DNA

SEQ ID NO: 3465 - DNA, 200 bp, synthetic construct
  source 1..200: mol_type = other DNA
cagccgggactgctctccctgaagacccctccagagagaaaataaactagcccagaccctcctctagccccgactgttagtcttgctgcttcctgtgcctaggaatccccctgccctcctagtttacccctcattgttgggggggaggggtgtagagtccccaggggtcattcgggatgtgtgggcttggaatcagggga

SEQ ID NO: 3466 - DNA, 200 bp, synthetic construct
  source 1..200: mol_type = other DNA
gattaaagagcgagaaaggagatgcccttcccctaggcctgaatgatttggggtgccaggcccctctctgtctccagcctacttgatcccttcctaagcgaggcagggaacgagggatgcccctgggcccagcagcctcgcacagcccctgctcccacaggatggggtgaggcttgggggtctggggtctctgggcatct

SEQ ID NO: 3467 - DNA, 200 bp, synthetic construct
  source 1..200: mol_type = other DNA
tcgagcagagccggtaaccaccacgtgccagagccgcccacccggagccgcccgcatgcagcttcacctcccctttccaggcgccactgttgagaagctagagattgtatgagaataaacttgttattatggaagcctggctcccaccccatctatttcttggtcatcttggcctttcacggacaccctgggcccggcct

SEQ ID NO: 3468 - DNA, 200 bp, synthetic construct
  source 1..200: mol_type = other DNA
ggggtgcaccccccaccctatggaccagtcaaataaaagccttcaggcccctcaaccagagtcccctcttactgctccgacgcgagagtggggagagagtgaagggcagtgtggtggtccccaaccccggaaagaaacacacagagcccgagtccgactggggcaggcgggctttattccgggtgctggagagctgtggg

SEQ ID NO: 3469 - DNA, 200 bp, synthetic construct; identical to SEQ ID NO: 2794
  source 1..200: mol_type = other DNA

SEQ ID NO: 3470 - DNA, 200 bp, synthetic construct; identical to SEQ ID NO: 2847
  source 1..200: mol_type = other DNA

SEQ ID NO: 3471 - DNA, 200 bp, synthetic construct
  source 1..200: mol_type = other DNA
gacccccgcccaccttgtctgtcttccgtctgtcccctgcccccatctagcagtgcctttcaggctggccaatgagatgggagggtttttggaggtccctgaagagccacagacagacagtgcatgagcaggggaagaaccacctcagggccagatgcgggggctcacgcctggaatcccagcactttgggagtccaagg

SEQ ID NO: 3472 - DNA, 200 bp, synthetic construct
  source 1..200: mol_type = other DNA
agcccctcctccaggaaggccttccaggacttcctcctctgggtcctctagctctgaccctacagggactccagatctcaacctgttccctggaagtagggcctgctctccatcccagtgaaataaacatgtattagacacctactgagtataattacttaacacttctgatttcactcagttgtcacacacacaaaaag

SEQ ID NO: 3473 - DNA, 200 bp, synthetic construct
  source 1..200: mol_type = other DNA
tctgaccctacagggactccagatctcaacctgttccctggaagtagggcctgctctccatcccagtgaaataaacatgtattagacacctactgagtataattacttaacacttctgatttcactcagttgtcacacacacaaaaagttgttttttgtttttgtttttgtttgagtctgtgtctcactctgtcgcccag

SEQ ID NO: 3474 - DNA, 200 bp, synthetic construct
  source 1..200: mol_type = other DNA
gggtcacctgttgtcgggaggggagccactccttctcccccaactcccagccctgcctgtggcccgttgaaatgttggtggcacttaataaatattagtaaatccttcaaagactccagaagcgtgatttctgcttttaaaggtaccacatggtttctgggcatgctggctcacgcctgtaatcccaacactttgggagg

SEQ ID NO: 3475 - DNA, 200 bp, synthetic construct
  source 1..200: mol_type = other DNA
gaccctggctccctgcagtggggacttcgtgggaggcactcatggctctctgggtctaatgaataaagtcctccacagcctagatcttgggtgatgtgttctgggttaatggaagtggcttgggtatagtgggggaatctggaacatcccagagggaagagaactctgaagttaccaaccatgcagtatgcatctggggt

SEQ ID NO: 3476 - DNA, 200 bp, synthetic construct
  source 1..200: mol_type = other DNA
ggccccggtcacacagtttctcggctcttcctccccgctgccccccacgaccctaccttgaaggcccccacaaataaaggcgctgccactcagccctccttccacctggggttcttggggcctgtgacctgactctgcctccctctacttccccgactcttgagcgcccagcttcagtcccatcccctctgcccatggtc

SEQ ID NO: 3477 - DNA, 200 bp, synthetic construct
  source 1..200: mol_type = other DNA
gtggttctttccttgaagggcagcctcctgcccaggccccgtggccctggagcctcaataaagtgtccctttcattgactggagcagcaattggtgtcctcatggctgatctgtccagggaggtggctgaagagtgggcatctcccttagggactctactcagcactccattctgtgccacctgtggggtcttctgtcct

SEQ ID NO: 3478 - DNA, 200 bp, synthetic construct
  source 1..200: mol_type = other DNA
tggagcagcaattggtgtcctcatggctgatctgtccagggaggtggctgaagagtgggcatctcccttagggactctactcagcactccattctgtgccacctgtggggtcttctgtcctagattctgtcacatcggcattggtccctgccctatgcccctgactctggatttgtcatctgtaaaactggagtaaaaac

SEQ ID NO: 3479 - DNA, 200 bp, synthetic construct
  source 1..200: mol_type = other DNA
ggaccagggtgaggacccgccggatgacagccaccctcaccgcggctggatgggggctctgcacccagccccaaggggtggccgtcctgagggggaagtgagaagggctcagagaggacaaaataaagtgtgtgtgcagggagtggcggctgtggtttttgctgcatggagtcagtagggacgggcctctgagggagggt

SEQ ID NO: 3480 - DNA, 200 bp, synthetic construct
  source 1..200: mol_type = other DNA
ggccgcctgccggggactcagacactcagggaacaaaatggtcagccagagctggggaaacccagaactgacttcaaaggcagcttctggacaggtggtgggaggggacccttcccaagaggaaccaataaaccttctgtgcagaatgagggactttgctgtgcttcccggagggcttcctggaggagtcagcccctaga

SEQ ID NO: 3481 - DNA, 200 bp, synthetic construct
  source 1..200: mol_type = other DNA
gtgttctggaaatacatactttctgaatgaccaaccgtccctggactgtggaatgttccggcctgcatttctgcccaccccttccgttgtcacgagtgccgtgccgtgtaataaagtcccagtgctcatccaccacagatgcctggtcctgttgcaggaagcccctcctgttagcagcgggatgcaagatgctgtctcgg

SEQ ID NO: 3482 - DNA, 200 bp, synthetic construct
  source 1..200: mol_type = other DNA
cgccacccgcggccacaccgcagggaccctcgccaataaacagccctcccaccaccgccgcctcgcctccgcctcctttgtgcaccgggcccgctgcgggggtgggcacactcgaagagggacttcacacggtccctgggtgatccaaggcggggagcatgagaagggcggtggagtgggacttcccgctggcctagaaa

SEQ ID NO: 3483 - DNA, 200 bp, synthetic construct
  source 1..200: mol_type = other DNA
ctacaagtgctcacagactagaacttaacggaacaagtctaggacagaagttaagatctgattatttactttgtttattgtctatatgccttttaaaaaaataaacttgttatgcaaaataaaacatttgggtaagttgttttagtatcatagccaagtggccagatctgtgttttgaatttttccccttcctaccaaaa

SEQ ID NO: 3484 - DNA, 200 bp, synthetic construct
  source 1..200: mol_type = other DNA
actcccctggcacctgacatctcccacgctccacctgcgcgcccaccgccccctccgccgccccttccccagccctgcccccgcagactccccctgccgccaagacttccaataaaacgtgcgttcctctcgacagcactttgtcggtctcggtccctcagcgcgaaacgccagcgccactgggccccagcagggggcgc

SEQ ID NO: 3485 - DNA, 200 bp, synthetic construct
  source 1..200: mol_type = other DNA
ctgacgttttctacgtagcttttgtatttttttttttaatttgaaggaacactgatgaagccctgccatacccctcccgagtctaataaaacgtataatcacaagctctggagagaaccatttgttcggccgcgcggggcgggggaccggggctgctcccgtatgcgtctgtaaagcgccgcgtcccgggggcaccggag

SEQ ID NO: 3486 - DNA, 200 bp, synthetic construct
  source 1..200: mol_type = other DNA
ccatgacctccactggaagagggggctagcgtgagcgctgattctcaacctaccataactctttcctgcctcaggaactccaataaaacattttccatccaacagctcctgtatctgcgactctgtcctcctactgggctttacaaaggaattaagatggaatgagccccaaggctgataggtagaaatcttgacttcca

SEQ ID NO: 3487 - DNA, 200 bp, synthetic construct
  source 1..200: mol_type = other DNA
actggcatccggccttgctgggagaataatgtcgccgttgtcacatcagctgacatgacctggaggggttgggggtgggggacaggtttctgaaatccctgaagggggttgtactgggatttgtgaataaacttgatacactatgctgtctcattgtggtcccctgggctccctaaggagggatggacagggaggcagga

SEQ ID NO: 3488 - DNA, 200 bp, synthetic construct
  source 1..200: mol_type = other DNA
gtctgtggccaggcacccgctcccacctggccgggcgctggctcctccctcagttctctttggaaaacccccagctgtccacccatcccctgccccaaaaccagtttcaataaatttacgttcatttccacccctggctgggcatggaagcacgctgtggggagcagggcttggcttccccacagctggaaatggcgggg

SEQ ID NO: 3489 - DNA, 200 bp, synthetic construct; identical to SEQ ID NO: 2726
  source 1..200: mol_type = other DNA

SEQ ID NO: 3490 - DNA, 200 bp, synthetic construct
  source 1..200: mol_type = other DNA
ctggctgcatctccctttcctctgtcctccatccttctcccaggatggtgaagggggacctggtacccagtgatccccaccccaggatcctaaatcatgacttacctgctaataaaaactcattggaaaagtgagtctatgcgtgtgaacgggccaggcagtggcaagaagctgggctggaatcagtgccctgaccaggg

SEQ ID NO: 3491 - DNA, 200 bp, synthetic construct
  source 1..200: mol_type = other DNA
cacccaataaagaactttgctgactactaagcccagtatacaattagcactgaagtacttcttgaagtacaatcctaattgggcaaagacccaacagatagcctcactgctcttcgccctagaagggcctattccaacatacacacagggccacatgtgggagggctgaccccaggtgcctctgggccaccagaatcccc

SEQ ID NO: 3492 - DNA, 200 bp, synthetic construct; identical to SEQ ID NO: 2827
  source 1..200: mol_type = other DNA

SEQ ID NO: 3493 - DNA, 200 bp, synthetic construct
  source 1..200: mol_type = other DNA
acggtgtgccagcgtcctccccacgaggcaaataaacacagaaaactcacgcatggaatctggtgtttattacactcgggggagagaggaggtcactcggtccagcggtggccgcagtgtggggctgtgcacacgtagtaaaggcgcatggcgtcctggcagaaatgatgcatggttaggaaggatttggacccagcagc

SEQ ID NO: 3494 - DNA, 200 bp, synthetic construct
  source 1..200: mol_type = other DNA
gaccaagaagcctggggggcctgagagtcttgaacaagtgtcaataaacgctggcctctgtgtgtgtctgtgtttgtgtccacccctccccaccaagcccatcctcccaccagccagggatctctgccctgtggactgcccactgcccccagccctcggtgcctcatgctggaccagggatactcctaggatgttgctac

SEQ ID NO: 3495 - DNA, 200 bp, synthetic construct
  source 1..200: mol_type = other DNA
tgtcccacctgccccagcccccagttactgtcacgcctctcttatgaggcccatcttgaagatgcaacctgtcacccagcccaggcctctctttctgttttgcttgatgtttacttctcgttcagactcaaataaagccttttttcaggaccagcagtgggctctcttaaaagctcgagttcagaaggtttgtaccagca

SEQ ID NO: 3496 - DNA, 200 bp, synthetic construct
  source 1..200: mol_type = other DNA
gtgtagtcggctcaacaccctccaccttcccctccatgccaataaaataaccaatccagatgccagcagcctgtcaatcactcgccaaggcagtgggtagggtgcagcagggcaggatcgccattaaagcacatcttggaaacaatcgtgaagctggaccagagcagcagtaactgaggttccattcacccagcacccag

SEQ ID NO: 3497 - DNA, 200 bp, synthetic construct
  source 1..200: mol_type = other DNA
acacccccagctggccctccacccccacctcaagtgccttattctcacagcaagccccttagtccccaagcccctccccctaaggcagctgggggagaggtgacctagtactggaaaataaatctgtgctacgccccccagcatcactgtgttggcctgctgaaattttggaggagtggacatccaggaattgtttcccc

SEQ ID NO: 3498 - DNA, 200 bp, synthetic construct; identical to SEQ ID NO: 2736
  source 1..200: mol_type = other DNA

SEQ ID NO: 3499 - DNA, 200 bp, synthetic construct
  source 1..200: mol_type = other DNA
ccgcaccccatcccaccagccccggccttgctttgtctggcctcacgtgtctcagattttctaagaaccaaaaaaaaaaaaggaaaaaaaacacaaaacaacaaaaaccaaaaaaaaaaaaaatcacaaaaacaaaaaaactataaaaaagaaagaattaaaaactttcagagaattactatttactttattaacttacg

SEQ ID NO: 3500 - DNA, 200 bp, synthetic construct
  source 1..200: mol_type = other DNA
tctattcctggggccataactcatgggaaaacagaattatcccctaggactcctttctaagcccctaataaaatgtctgagggtgtctcatgagtgtgtgtctccatctgctccccggctactcttcccttccttggttcagtcatgcacttcatctatccttcatccatccagtcatctgaccatccatcctcctgtca

SEQ ID NO: 3501 - DNA, 200 bp, synthetic construct
  source 1..200: mol_type = other DNA
tctctgggctggggactgaattcctgatgtctgagtcctcaaggtgactggggacttggaacccctaggacctgaacaaccaagactttaaataaattttaaaatgcaaaaactcggagatcctcagtttggactcagtttctgcctcttctgggctctagccgacggttcctgcagtacgaggcttgggccagcagggg

SEQ ID NO: 3502 - DNA, 200 bp, synthetic construct
  source 1..200: mol_type = other DNA
gtcccagggcattcagggctggttcagacaccattattgtgagcagcaaagcacttttctagtggtctgtttgtgagcctttcacttgtttgttccccacccccaaacctttgctgttaataaagtcaacttctctttacttcccctcccagcccctatgatgtcattcagcccagcacatacctcccgcaacccccagg

SEQ ID NO: 3503 - DNA, 200 bp, synthetic construct
  source 1..200: mol_type = other DNA
gcccatcgtgactcaaaactcacttgtataataaacagtttttgagggattttaaagtttcaagaactgtgtgtggccttatgtgttggtattggatgtttaaccagacagaaatcagtaaacatcctggacctattgccagtctggattttgaccctccccagaagtggtcgcgctgggcttggtgtgggtgagtggaa

SEQ ID NO: 3504 - DNA, 200 bp, synthetic construct
  source 1..200: mol_type = other DNA
ctgaccctcgtcgctgcgagtccaaaaagtttggaggccctggtgcccgcgctcgctaccagaaatcctaccgataagcccatcgtgactcaaaactcacttgtataataaacagtttttgagggattttaaagtttcaagaactgtgtgtggccttatgtgttggtattggatgtttaaccagacagaaatcagtaaac

SEQ ID NO: 3505 - DNA, 200 bp, synthetic construct
  source 1..200: mol_type = other DNA
ctctgggcctcctcaaactcagtgcctgggtccagggccccagtgcttccagaccaagacttgggccaccacttgtccaataaagtacatcccagacgccacacctgctgtgtcccgagagtctccagatgggggcatcagggtgaggtccgggactcttgggtcatcgtcccacagtggctgatcggctgccaagcaca

SEQ ID NO: 3506 - DNA, 200 bp, synthetic construct; identical to SEQ ID NO: 2814
  source 1..200: mol_type = other DNA

SEQ ID NO: 3507 - DNA, 200 bp, synthetic construct
  source 1..200: mol_type = other DNA
ccttcccttccctccaccacaccactcaggggctggggcttctctcgcacccccagcacctctgtcccaaaacctcattcccttttttctttacccaggattggtttcttcaataaatagataagatcgaatccatttaatttcttcttagaagtttaactcctttggagaatgtgggccttgaataggatcctctgggt

SEQ ID NO: 3508 - DNA, 200 bp, synthetic construct
  source 1..200: mol_type = other DNA
cactctgtccccatctgggagggtggcattctgggacatgaggagcaaaggaagggggcaataaatgttgagccaagagcttcaaattactctagagaaaccgactgtgtgactcttcctctctctgcctctgtctgagtattttggtgtgtctgcctgcctctgtgtaagatttgcttgttatgcattcattcatttgt

SEQ ID NO: 3509 - DNA, 200 bp, synthetic construct
  source 1..200: mol_type = other DNA
gcacaagaatagccgcccagtgactgccaagtgagtgaaccagcctgcttggagcctgcctctttcccaaactgctcattatcctgttaccccacccagcccacgtgtccaaatacactccagatgcaaaataaaaagctctacgacattggctctgaatgttctgtttattggggtgttgtcatgggtaggaggctcag

SEQ ID NO: 3510 - DNA, 200 bp, synthetic construct
  source 1..200: mol_type = other DNA
ccatctagctgcacccgacaagcacccagactctttcacataacaaataaaatagcagagttccctttctgcattgtcctgtggtccatgagagagcaggggtgaggaaggtgtgaggaaggccaagcatgtccagggaggtggggacccaggaagaggagcctggcaaagtgacagtgtcctgcccagcaactggggga

SEQ ID NO: 3511 - DNA, 200 bp, synthetic construct
  source 1..200: mol_type = other DNA
acaaaccatgctgggttaataaattgcctcattcgtaatcctggtctgggtctcttttttgagtctcttgctctgtcgcccaggctggagtgcagtggcgccatctcagctcactgcaatctccgccttctgggttcaaatgattctcctgcctcagcctcccaaagtgctgggattacaagtgtgagccactgtgcctg

SEQ ID NO: 3512 - DNA, 200 bp, synthetic construct
  source 1..200: mol_type = other DNA
gcatcctgctgccttcccacaacattaaactctccttcctcagtgtgctgtttcctgctttatggtcgaacctgtctgggtatctgggtaccaccattagtccttatcctgatctgtgaccctgcagttctgcaaggtgttttttgtgtgagtcagggtctctctccgtcacccaggctagagtacagtggtgagtccac

SEQ ID NO: 3513 - DNA, 200 bp, synthetic construct
  source 1..200: mol_type = other DNA
gagaggctgaggctagggctggggacagatatcttgtactcccagtgacctcaataaagtacttttcatggtcctcttgattttcagtgagttgctgactcagaagagcagcttttcttagctctgagttctaggtccaagatggaggggaaggtactgttgcttgttaccttcatagggcctgaggagccagcatggtg

SEQ ID NO: 3514 - DNA, 200 bp, synthetic construct
  source 1..200: mol_type = other DNA
ggaagttccctgtcttccccgtccttttccaccagtctcgcctctggccttctctggccactcctgggagggactgcctcaccacccctgtcccgctgccagaaatacacccacaataaaaacctgaaaaccaactccgcctacatccattttgtcccagggtaggaatctgggtggagagagaggattggtgagagagg

SEQ ID NO: 3515 - DNA, 200 bp, synthetic construct
  source 1..200: mol_type = other DNA
tctcacttctgtcagatgctcccatccactattaatgcactaggtgggaggagagggcggcaatgacactgcacctctcctttcccaccgcattccctggagctccctaaataaaactttttttaacgtgagtctgacttctacctattttctgggggaaccaattgggtttctgggccgaaaggggtggggttctggtc

SEQ ID NO: 3516 - DNA, 200 bp, synthetic construct
  source 1..200: mol_type = other DNA
cgccgaagcctgcagccatgcgaccccacgccaccccgtgcctcctgcctccgcgcagcctgcagcgggagtccctgtccccgccccagccgtcctcctggggtggaccctagtttaataaagattcaccaagtttcacgcatctgctggcctccccctgtgatttcctctaagccccagcctcagtttctctttctgcc

SEQ ID NO: 3517 - DNA, 200 bp, synthetic construct
  source 1..200: mol_type = other DNA
tcatgaggacctgaagggtgacatcccaggaggggcctctgaaatttcccacaccccagcgcctgtgctgaggactccctccatgtggccccaggtgccaccaataaaaatcctacagaaaattctctcctgagtgcttctttactctggggaaggggctgcgggagagggtaggggcttccagagagggcagggtctgc

SEQ ID NO: 3518 - DNA, 200 bp, synthetic construct
  source 1..200: mol_type = other DNA
gacctgaagggtgacatcccaggaggggcctctgaaatttcccacaccccagcgcctgtgctgaggactccctccatgtggccccaggtgccaccaataaaaatcctacagaaaattctctcctgagtgcttctttactctggggaaggggctgcgggagagggtaggggcttccagagagggcagggtctgcaggagag

SEQ ID NO: 3519 - DNA, 200 bp, synthetic construct
  source 1..200: mol_type = other DNA
agccagaccccccatcagtggacaaggggagagtcccctactcccctgatcccccaggttcagactgagctcccccttcccagtagctcttgcatcctcctcccaactctagcctgaattcttttcaataaaaaatacaattcaagttgcttctcatggatggcactgcttttctgaggactcaagggccaagatggagg

SEQ ID NO: 3520 - DNA, 200 bp, synthetic construct
  source 1..200: mol_type = other DNA
cagaagagtggggggtggggaggacaagggggtgggtaaggggctcaagctgtgatgctgctggttttatctctagtgaaataaagtcaaaagttatttaattcccgtcacctgtctcagtgtcatctgtgtggttggtgcagggctctcccaccccagggcccatgggccagcagagccagctgggagggcgcttgggt

SEQ ID NO: 3521 - DNA, 200 bp, synthetic construct; identical to SEQ ID NO: 2804
  source 1..200: mol_type = other DNA

SEQ ID NO: 3522 - DNA, 200 bp, synthetic construct
  source 1..200: mol_type = other DNA
tgaccccagctgccaaggaaacccccagtgtaataataaatcgtcctcccaggccaggctcctgctggctgcgctggtgcagtctctggggagggattctgggggtgtcaccttctggtggcccaggtgggcaccttcagctttctttagttcctcagtttcccgggggcagactacacaggctgctgctgctgctgctt

SEQ ID NO: 3523 - DNA, 200 bp, synthetic construct
  source 1..200: mol_type = other DNA
aagtaccctgatgaccccagctgccaaggaaacccccagtgtaataataaatcgtcctcccaggccaggctcctgctggctgcgctggtgcagtctctggggagggattctgggggtgtcaccttctggtggcccaggtgggcaccttcagctttctttagttcctcagtttcccgggggcagactacacaggctgctgc

SEQ ID NO: 3524 - DNA, 200 bp, synthetic construct
  source 1..200: mol_type = other DNA
gcgacacggccgtggggcctggcaggcgctggacagcgcccgaggactgggacattaaacctgacctcccctcctccagatgcagagtattggttcgtgttccttgggaagggcggcgaggagcggactaactggagaggcaggagggcgggtggagggagaggggggtgaggacccgggggagtcagaaatggacagag

SEQ ID NO: 3525 - DNA, 200 bp, synthetic construct
  source 1..200: mol_type = other DNA
cgccccgcctcgctcggctgcccccgccccttcccggcccccctcgccgcgcgtcctccaaaaaataaaaccttaaccgcgggctctgccttgatcttccttccttccgcctccagggacccaggctgcgcacgcttgacctctcctgaacctaacatggtccccaccgccagctgctcagccctcagaatgcccatctc

SEQ ID NO: 3526 - DNA, 200 bp, synthetic construct
  source 1..200: mol_type = other DNA
aaacacgtcgattctgtccaggttccttgatgcgctgtggcagggcaggcagcggggcgtggagaatcctcaccacaccaaggcttccagaggccggggtccccgactcagagtcccgcccagaggcaaaggtgctgcaggaacccagcgctgggcatctcacttcccggggtgggggcctgactccccagtctgaggga

SEQ ID NO: 3527 - DNA, 200 bp, synthetic construct; identical to SEQ ID NO: 2748
  source 1..200: mol_type = other DNA

SEQ ID NO: 3528 - DNA, 200 bp, synthetic construct
  source 1..200: mol_type = other DNA
tggatggtgtcccccatggtcgctgagtctccccttcgaggattgcacccgcccgtcctaagcctccccacaaggcgaggggagttacccctaaaacaaagctattaaagggacagaatacttcctgttttctcagtggtctgattctaggcgcggtggggaaacatttgggtattaaagaacagacttcttccggaaac

SEQ ID NO: 3529 - DNA, 200 bp, synthetic construct
  source 1..200: mol_type = other DNA
agatttatcttgttgtctaagcatctgactcactccccgggacgggactgattctagcctttggttccccgagaggagaggtctggggatgggctccggcctgagggaggaagggcagaaaaccgggacccttgggtcctggaggggaccaactgactgcgatgtaattccagaatcaaggaatggggcagggccaaccc

SEQ ID NO: 3530 - DNA, 200 bp, synthetic construct; identical to SEQ ID NO: 2856
  source 1..200: mol_type = other DNA

SEQ ID NO: 3531 - DNA, 200 bp, synthetic construct
  source 1..200: mol_type = other DNA
aagctggctgttgaataactcaataaaataccatacccttgccagcttctgtgcctcctcatttggaggaagggccccgacatgccttcttttgcaccaccttaataaccaacactgaccgggcaaggtggctcacgcctgtaatcccaacactttggcaggctgaagctggtgcatcacctgaagtcaggagatcgaga

SEQ ID NO: 3532 - DNA, 200 bp, synthetic construct
  source 1..200: mol_type = other DNA
ggtggggaccggggagcacctgcctgtagcccccatcagaccctgccccaagcaccatatggaaataaagttctttcttacatctaacaacaccatctcctttcactatttatccccaaccgcctgccaaccaggccatggcaaaggcccccagtcccagctctgagcatgagagctggctgtgctagctcttgcctaag

SEQ ID NO: 3533 - DNA, 200 bp, synthetic construct; identical to SEQ ID NO: 2754
  source 1..200: mol_type = other DNA

SEQ ID NO: 3534 - DNA, 200 bp, synthetic construct
  source 1..200: mol_type = other DNA
tcagggtgtctccttgtgcttctgagatgtggagaagaggctgctggcttccctaaaagttgaaataaaagatttttgcctttgttctgtctctgactggggatatgtgggtgttgggagggaagagggacattgggctgtgcccctccagtcctatagaggtcactgccccagctcaggcctcatccttccccctggat

SEQ ID NO: 3535 - DNA, 200 bp, synthetic construct
  source 1..200: mol_type = other DNA
caattaatggtggccatgccgcttctgccggtgccttcttgatcagggtgtctccttgtgcttctgagatgtggagaagaggctgctggcttccctaaaagttgaaataaaagatttttgcctttgttctgtctctgactggggatatgtgggtgttgggagggaagagggacattgggctgtgcccctccagtcctata

SEQ ID NO: 3536 - DNA, 200 bp, synthetic construct
  source 1..200: mol_type = other DNA
cccaataaagactgttaattcctcatgcgttgcctgcccttcctccattgttgccctggaatgtacgggacccaggggcagcagcagtccaggtgccacaggcagccctgggacataggaagctgggagcaaggaaagggtcttagtcactgcctcccgaagttgcttgaaagcactcggagaattgtgcaggtgtcatt

SEQ ID NO: 3537 - DNA, 200 bp, synthetic construct
  source 1..200: mol_type = other DNA
gctggacatcggcccgctccccacaatgaaataaagttattttctcattcccaggccagacttgggatcttccgcgcctttaccagagcattggtgggggtgggggtgtgcctcggggaattgggcagagctgctgtcagagaggctgcctgcccatgtctgtgggtgaggacagtggagcctgaactgagatgcctgcc

SEQ ID NO: 3538 - DNA, 200 bp, synthetic construct
  source 1..200: mol_type = other DNA
gtgtgtgcgggagtccaaataaaccggcttgggtgcgcaacgacgtggcgccttcattcgcggcgtgggcgccccggggacagggcaggcgaggatgcagggccgtgcaaacagtgctcctacagcgcacgctggagtttgaaagagcgggctaagcatattgaatgtggtctcacattaagaacaaaatctggccaggc

SEQ ID NO: 3539 - DNA, 200 bp, synthetic construct
  source 1..200: mol_type = other DNA
actggttcctgctatgatcacttgtgcgtgtctggtgttgggtgccctctgacccaatatggttgttattcccgctcagggtctcagtttacccatctgtgcagctatatacaactcaggtgctcaatgcatgaagaccaagcactgcagggggcagctgacacctcctcacttctgcccagggacctggtgggtgatgg

SEQ ID NO: 3540 - DNA, 200 bp, synthetic construct
  source 1..200: mol_type = other DNA
gccctcgctcctcatggtgtgcctccaacccccctgttccccaccacctcaaccaataaactggttcctgctatgatcacttgtgcgtgtctggtgttgggtgccctctgacccaatatggttgttattcccgctcagggtctcagtttacccatctgtgcagctatatacaactcaggtgctcaatgcatgaagaccaa

SEQ ID NO: 3541 - DNA, 200 bp, synthetic construct
  source 1..200: mol_type = other DNA
acctcatgtccctgccctcttcgtgtgcttttccaagtcttcctattccactcagggctgtggggtggtggttgccctacctgtttttgccaaaaataaattgtttaaaacttttcttattaaaaacgttacaaagtattcaattgtctgttcttacacttgggaactaaagttttaaggagaggagatttggttcagag

SEQ ID NO: 3542 - DNA, 200 bp, synthetic construct
  source 1..200: mol_type = other DNA
tccttccagcaggcagctggcctctccaaggaataagggtgaaattgccacagctggctgacacaggacaggggcaactggtttggcaaccccacatccaggccaataaagatgtgtgagctgggtgtgtggtgtctgctatgctcttgggcagggcaggggtagaagaggtaaggaccagggtggaggaggacagaagc

SEQ ID NO: 3543 - DNA, 200 bp, synthetic construct
  source 1..200: mol_type = other DNA
acaggacaggggcaactggtttggcaaccccacatccaggccaataaagatgtgtgagctgggtgtgtggtgtctgctatgctcttgggcagggcaggggtagaagaggtaaggaccagggtggaggaggacagaagctcccatccattcccaggcccagccagggattcccagttgcagtcacagcttcaaccacagcc

SEQ ID NO: 3544 - DNA, 200 bp, synthetic construct; identical to SEQ ID NO: 2712
  source 1..200: mol_type = other DNA

SEQ ID NO: 3545 - DNA, 200 bp, synthetic construct
  source 1..200: mol_type = other DNA
tccccaacacccaataaagttcctttttaacacacgccccggctcccgtcactgacatccctcaggactgggcaggaggaaaccccagggggcatctctgtccttgttctcacttcagcagacatccctggggccctgggtgaatgacgctggggcctccgtggtgagtcacaggcagtctggtgcaacctgattcgtgg

SEQ ID NO: 3546 - DNA, 200 bp, synthetic construct
  source 1..200: mol_type = other DNA
tgacacgcttctgagcaggggcccctggggacttcaactgcccagcaacatggaggatggtgtcctgaggcctccaaggacggtccccacccctctacgtttccccaataaagccttttaaaaacctgcctgccttctctgctcactgcccgatgccttgcagccccctagctctaaggtggcccagcaggctggacagc

SEQ ID NO: 3547 - DNA, 200 bp, synthetic construct
  source 1..200: mol_type = other DNA
gccccgcccagctcccctccacaataaacgctgtttctccttgagcttggccggcattttgctggaaggagggtggtccccacgggggaggggctccaggcctgccagtttcttacatggaggaggctttaaggacattttcaggtaacaaaaggtggggccctaccgaggggagtccagctgggacctggcatgagcac

SEQ ID NO: 3548 - DNA, 200 bp, synthetic construct; identical to SEQ ID NO: 2786
  source 1..200: mol_type = other DNA

SEQ ID NO: 3549 - DNA, 200 bp, synthetic construct
  source 1..200: mol_type = other DNA
ttctaggataagcactagatctcccttaataaactcacaactctctggttccttgcctgtctctgttttggccctgtggggagggctggatggggatccgggattgttcctgctggcagactaggtggggatgtgcagaaaccaagttctcatggtcactttggccatcaccactgcctaaagtgatccctcgttttctg

SEQ ID NO: 3550 - DNA, 200 bp, synthetic construct
  source 1..200: mol_type = other DNA
gacccacgagcggggtgagagaagtgtgcaatagtctggaataaatataaatgaaggaggggccatgtctgtccatttgaagtcctcatgctggttgagtctggaagaaggactcagcagtttccctatctcataggagtagaaacagagctcaaataaggccaggcacagtggctcacacctgtaatcccatcactttg

SEQ ID NO: 3551 - DNA, 200 bp, synthetic construct
  source 1..200: mol_type = other DNA
ctccactcttgttggcctgggaacttcttggaactttaactcctgccagcccttctaagacccacgagcggggtgagagaagtgtgcaatagtctggaataaatataaatgaaggaggggccatgtctgtccatttgaagtcctcatgctggttgagtctggaagaaggactcagcagtttccctatctcataggagtag

SEQ ID NO: 3552 - DNA, 200 bp, synthetic construct; identical to SEQ ID NO: 2717
  source 1..200: mol_type = other DNA

SEQ ID NO: 3553 - DNA, 200 bp, synthetic construct
  source 1..200: mol_type = other DNA
gcccctcccagagatggcaataaaactgactctcaacatctatctctgttaacttatttcctagagtcccattatttggttcattcaacatttacttgagtcttttgtgtgccaggccctgtggatccagtccctgcccatgaggagcctctgtattgatgcgggggacaatgaggacaaaggcagctgtaattcggggt

SEQ ID NO: 3554 - DNA, 200 bp, synthetic construct
  source 1..200: mol_type = other DNA
ctgcagcctgcctggggcagaataaaggaacggctttttttagcgctgcggctccgcgtgcttttctgcgggtcgtggggacgcaggcacggggttgcatagaggctcagggaagacataaggacatgaactcatagggaacgtggagtcagggagtcacagacatggagtcacaagtctccatggattgggatgggaac

SEQ ID NO: 3555 - DNA, 200 bp, synthetic construct
  source 1..200: mol_type = other DNA
gcccgtccgtgatgatgggaacatgcccgacgtgcccagccacccccaggaccctcagggccccagcctggagtggctgaagaaactgtgagcacctccactgacagaggcggcccctcccacggctcccaataaaaatgtgaaaaccaacccccgaacgtgagcatgtgtgtgatcagaggtgggaacaagtagacggt

SEQ ID NO: 3556 - DNA, 200 bp, synthetic construct
  source 1..200: mol_type = other DNA
gatgggaacatgcccgacgtgcccagccacccccaggaccctcagggccccagcctggagtggctgaagaaactgtgagcacctccactgacagaggcggcccctcccacggctcccaataaaaatgtgaaaaccaacccccgaacgtgagcatgtgtgtgatcagaggtgggaacaagtagacggtggccggggtgagt

SEQ ID NO: 3557 - DNA, 200 bp, synthetic construct
  source 1..200: mol_type = other DNA
cacctccactgacagaggcggcccctcccacggctcccaataaaaatgtgaaaaccaacccccgaacgtgagcatgtgtgtgatcagaggtgggaacaagtagacggtggccggggtgagtgtggggtcagtttattgggcatgcgtcagtcagaggctgggctggccagggtcgggtagggcagcagtttgtctggacc

SEQ ID NO: 3558 - DNA, 200 bp, synthetic construct; identical to SEQ ID NO: 2740
  source 1..200: mol_type = other DNA

SEQ ID NO: 3559 - DNA, 200 bp, synthetic construct
  source 1..200: mol_type = other DNA
attaaggttgaggaagactttggctttgaagcagatgaggccctggattccagttgggtttctcggggtccagacaaactgctgccctacccgaccctggccagcccagcctctgactgacgcatgcccaataaactgaccccacactcaccccggccaccgtctacttgttcccacctctgatcacacacatgctcacg

SEQ ID NO: 3560 - DNA, 200 bp, synthetic construct; identical to SEQ ID NO: 2792
  source 1..200: mol_type = other DNA

SEQ ID NO: 3561 - DNA, 200 bp, synthetic construct
  source 1..200: mol_type = other DNA
ggatgccgccccggacagtggcacctgggaagcctgggagtgtttgtcccatcggtagcttgaaataaacgctcccctcagacacccgctgggttctctgatgttattatggttgagatgcagctggtctctcctggttaattgacttcttattaccaacaagttacttgaaagagtgtcaccaataatcattaaagtac

SEQ ID NO: 3562 - DNA, 200 bp, synthetic construct
  source 1..200: mol_type = other DNA
gagaggcagtgattcccctcccgccccgcacagagtccccgactcactgccagccggggcggggcagggtgccgcaggctgggcttgctaataaagacccgagtctccccgcctgtgttttgttttcctggggggagggaagggggcaaagtcatggtcctagcccccgcctgggagcgtggagtcttaagtcttgcgtc

SEQ ID NO: 3563 - DNA, 200 bp, synthetic construct
  source 1..200: mol_type = other DNA
ccctgtctgcctctgttccctttgtgtgtgttcagggagctctcctggctctgccacctcatttgtctttatttttttctcttttaagatgtaagatgctaattaataaaagctgaatcatttcataccagctcttcatagttgtgtgagttattatgtgactgggtagaatctttatttcttgtgggaactctttccca

SEQ ID NO: 3564 - DNA, 200 bp, synthetic construct
  source 1..200: mol_type = other DNA
tttcccagctgctgcccaataaacctgtctgccctttggggcagtcccagccacctgtgctgttgtctgtcttcggtggggggatgtgggtggcatagccctggtggccttgggagctgctcaccttcctgacctgttggcctgtggggacctggaagtattgctgactcagaaccatggcaccccagggctagcaggtg

SEQ ID NO: 3565 - DNA, 200 bp, synthetic construct
  source 1..200: mol_type = other DNA
gtgcccctgccactccgagataaccagtggatgcccaggatcttttaccacaacccctctgtaataaaagagatttgacactagtctccaggcccatgtgacttttggcctgatgtgggaccagactggggtccctgggaggatgggcatcactaaggcaagaggcacttggtactaagctaagggtgggggtttggggc

SEQ ID NO: 3566 - DNA, 200 bp, synthetic construct
  source 1..200: mol_type = other DNA
agcgtatactattttcttctttgagaattacaaaaaaattatttctacactgacaggatttactagttaagcaatgtttaatataaattttaaaaaacttctgttctacaaaatttccattccgtatgtaaaagattttgtttttctatataaaaagagctgactgacatatctttaaatactttgtactaactttatca

SEQ ID NO: 3567 - DNA, 200 bp, synthetic construct
  source 1..200: mol_type = other DNA
atgaggttttttgcattccaaggaaatggcatatggattaactgtaagaaatgaaataagtaatttattgtaagacaacatcaagccatggaaacttggcagaagattcaaagcagcttaaacagcacttttaaattaactcctaagcgttacatggttgtgactatggaaactccagttaagacaggatcttatcagag

SEQ ID NO: 3568 - DNA, 200 bp, synthetic construct
  source 1..200: mol_type = other DNA
caaaaatgactaaataaaaagtatatattcacagtactctgtttcagttatgtttttcaaaattccaaattcacggatgcgcagctgtcttcattatcagtggcgtcctgtgtgggccagaggatttcagtaggaggggtgtctgtgccagaaagcttgatgcctgtgaggttctgcttgtattcaggggtacaagtgtc

SEQ ID NO: 3569 - DNA, 200 bp, synthetic construct
  source 1..200: mol_type = other DNA
actgtgcctgtatatgaactttgaaaaaatacttgactctacttttgttacctaaaataaaatgcattcgtttctctgggggagcctgtttacttttaatgtcaaatggcctttatttcaacagcctgaatactgctaaattgctaattaatttgtccattattctagaactaactactagatcaactgcccattatttt

SEQ ID NO: 3570 - DNA, 200 bp, synthetic construct
  source 1..200: mol_type = other DNA
atgtcccaagcagcctcttgccagcagtgcagagcctggttgtcacccattaaaggataggtctccccggagtgcacagctccacctgggagcctggcgcgtcatcattggcctgacagcagagagaattgagaagcatttctcccctgccccaccccggggctgacatttctaagcaagataggaagggagcactttct

SEQ ID NO: 3571 - DNA, 200 bp, synthetic construct
  source 1..200: mol_type = other DNA
gggccacctgtggccctgctccttagcagaaaaagcatctggagttgaatgctgttcccagaagcaacatgtgtatctgccgattgttctccatggttccaacaaattgcaaataaaactgtatggaaacgatgagcaagctgccgcttttttaaccttttttttctttcttgtactgagtggtgaacatattttcttat

SEQ ID NO: 3572 - DNA, 200 bp, synthetic construct; identical to SEQ ID NO: 2835
  source 1..200: mol_type = other DNA

SEQ ID NO: 3573 - DNA, 200 bp, synthetic construct; identical to SEQ ID NO: 2816
  source 1..200: mol_type = other DNA

SEQ ID NO: 3574 - DNA, 200 bp, synthetic construct; identical to SEQ ID NO: 2784
  source 1..200: mol_type = other DNA

SEQ ID NO: 3575 - DNA, 200 bp, synthetic construct
  source 1..200: mol_type = other DNA
cgggggaaacacagggttaataaatgccatactccctaccctcagcaactctgctgcctttgtttctcttttagcatctccaccacttaagttaggagtccagacttcacaaccccttttatcacctgctactcagacctttgtgaagacctgctcaagtaactagctccatgccagtacattgggactaacctgaagac

SEQ ID NO: 3576 - DNA, 200 bp, synthetic construct
  source 1..200: mol_type = other DNA
ttggtagagctgaggaagagttagggcctctccctcattaaagttttataaataattgagtccactgtattctttgatcaaagtcattcccaacaccacacagtgccttttccccaaaaggaatcataatcaagtagaagaaaagagaagttactttattacaatttgttatctcatcccgaggtcagggccccttgctt

SEQ ID NO: 3577 - DNA, 200 bp, synthetic construct
  source 1..200: mol_type = other DNA
acctcccacagcccagtgtgccaggacgtgctgaaattcatcagtcagtggtgtggagggctccccagcaccagcttttcctttcagtagttggtagagctgaggaagagttagggcctctccctcattaaagttttataaataattgagtccactgtattctttgatcaaagtcattcccaacaccacacagtgccttt

SEQ ID NO: 3578 - DNA, 200 bp, synthetic construct
  source 1..200: mol_type = other DNA
gatggatctgaaatgggcaattattatttatcttatttttttgatggactattctcctggttactttcccccttagagttccagatgtacatggtatattttgaagtagaaataaaagaattacttatttttctaaggttttattatcttgtacttttttaatcacagagaattttccagtaactaggtttgtgatgaac

SEQ ID NO: 3579 - DNA, 200 bp, synthetic construct
  source 1..200: mol_type = other DNA
tctgctggaagcagattctggaaaaggtgctttcacctgctggtaaaagatacatctgtatatctgaaatgcaagatattgatttttaaaataaatttgttttatgacttaacattcttggttttgtgatgttttcaattttatatgctttctgaagtatattaaatttttaaaactccctatttcgttaggtctaatta

SEQ ID NO: 3580 - DNA, 200 bp, synthetic construct
  source 1..200: mol_type = other DNA
atttcagcttggacattttacccttcagtcggcccaagaaatcaaaataaaggaaacacatttcatatactgcaggtaacaaaagtcaaagtattttatcttttcacagcaagaacagtccatgttgtatataatacaaccaacattatagaacttttagggttgtgactggctttggtgcaaatgtgtgctcaagctaa

SEQ ID NO: 3581 - DNA, 200 bp, synthetic construct
  source 1..200: mol_type = other DNA
cagttcatctcctcacggactccactctctttttttttcatgcttgctgtacaatgagaactcaaataaaaataaaccaaagtttacaatcaactgtagaagtagtttagtgtaactggcttcacagatggctgccacagagtgtgaagattgtttgttagttttaagcattcttttaatggctcctaagacatgcagat

SEQ ID NO: 3582 - DNA, 200 bp, synthetic construct
  source 1..200: mol_type = other DNA
tgtgatgttaaattaaagttgaaatgtagtaattgaagcttttagttgtaaggaaagcaacttaatctgttatttgaaatgacttcatacactacccctataagtttgccaataaaaccatcacctgcttacacctttttgaactttatattcattgtcttacaattagtttaaaataaatgacatgattcaattcagtc

SEQ ID NO: 3583 - DNA, 200 bp, synthetic construct; identical to SEQ ID NO: 2718
  source 1..200: mol_type = other DNA

SEQ ID NO: 3584 - DNA, 200 bp, synthetic construct; identical to SEQ ID NO: 2716
  source 1..200: mol_type = other DNA

SEQ ID NO: 3585 - DNA, 200 bp, synthetic construct
  source 1..200: mol_type = other DNA
ttctatatcttaaccagctgagggagcttgtacaacaccttatgtatgctggttgggaaaaactgattttaacgtaactaacttataaataaatctagagtaagaagatctcagaaataaatcacacttttgttatgatgacatttagatttgtctttgaaatatttatactattgcttccttttccccatatggtcatt

SEQ ID NO: 3586 - DNA, 200 bp, synthetic construct
  source 1..200: mol_type = other DNA
aattacattaaaaatgtaaataactcaacgtgttgtttgtttgaaggtagaaatgcactactactggccaaaaagtatctaagttgttttaccatgtgttcatatgcatttgcacaaactgtcaaagtgctcagaaataggaaaccttatttaaggatgcctccaactagaaatccttgaatggaaagactggcaatatg

SEQ ID NO: 3587 - DNA, 200 bp, synthetic construct
  source 1..200: mol_type = other DNA
aattaagaacaatttaacaaaatggaagttcaaattgtcttaaaaataaattatttagtccttacactgagccttttagtttcgaacacttttgtaaatccaaatatcttaaacactttaggtaaaggacagtagggaaggcagctactcatactgattagtttaatacaaattcctggatgttttcccttggaaagagg

SEQ ID NO: 3588 - DNA, 200 bp, synthetic construct
  source 1..200: mol_type = other DNA
aatccaaattcatgctgttttttttctctgcaactcgttagcagaggaaaacagcatgtgggtatttgtcgaccaaaatgatgccaatttgtaaattaaaatgtcacctagtggccctttttcttatgtgtttttttgtataagaaattttctgtgaaatatccttccattgtttaagcttttgttttggtcatctttat

SEQ ID NO: 3589 - DNA, 200 bp, synthetic construct
  source 1..200: mol_type = other DNA
aataatctggattttctttgggcataacagtcagacttgttgataatatatatcaagtttttattattaatatgctgaggaacttgaagattaataaaatatgctcttcagagaatgatatataaatattgcatgtttgctttacctcatatgagttatttataacctcttgaatcatcttctgtacacgtggattttat

SEQ ID NO: 3590 - DNA, 200 bp, synthetic construct; identical to SEQ ID NO: 2822
  source 1..200: mol_type = other DNA

SEQ ID NO: 3591 - DNA, 200 bp, synthetic construct
  source 1..200: mol_type = other DNA
aagtatttgccagtggccatcagggctgagggcaagaatatattttttataaggaattgggaattttagtcttttaagcaaagtttacgaatgaagaaatgaaggatggccacaagcgtaaggcatatgtcacttgcctctggacactggttattttatgtttcagtccctaaaaaatgaaatggaaaaaagtggtgcta

SEQ ID NO: 3592 - DNA, 200 bp, synthetic construct
  source 1..200: mol_type = other DNA
gggctggtcccggctccaccccctccaagctcagtggacactgggtctgaaaggaaggagtcttttgcttcctttctcctttttacaaaaacaaacatagaagaaaataaatgcactttatccactccccaattggactgcattatcaaacacatgtgctatgtacatcctcagtgcacctgccagcagatatcctggag

SEQ ID NO: 3593 - DNA, 200 bp, synthetic construct; identical to SEQ ID NO: 2818
  source 1..200: mol_type = other DNA

SEQ ID NO: 3594 - DNA, 200 bp, synthetic construct; identical to SEQ ID NO: 2848
  source 1..200: mol_type = other DNA

SEQ ID NO: 3595 - DNA, 200 bp, synthetic construct
  source 1..200: mol_type = other DNA
ccgtagcacagctaatgaagaactcagcccccaaagtgtggtcacgctcctctaagcctgctgcctccctctgatccctgagcctctggcagtagtaactggtccctccctctgctagccagaaataaacacctgagttgccttaggaactagtctgatgtctcttgtcagtttcttccaagggtgtccaccctctcact

SEQ ID NO: 3596 - DNA, 200 bp, synthetic construct
  source 1..200: mol_type = other DNA
gcccttaacccggactctgcgccccgtcccatgcccgctcttgagtatcttccccaccctattaaattacatccggtgcttcggcttgtacagaactgggggagtgggatgttgtgggcagaccagtctccggtatacacgtattttgcccctgtcggagcttgcgtcgatgcctggggcttggaaaccaccgcaaaaaa

SEQ ID NO: 3597 - DNA, 200 bp, synthetic construct
  source 1..200: mol_type = other DNA
tactggtcgctgacagcgccaaagagtccaacaagatgattttagcgtggactaggacacttaacctaagaagagtttcacttaatcattcaaatcactatctgaagggtcacggagcgcaaaataaagtttaaaaccctgctaccacaatgtttctggaacaagactagatcagagaggtgtctggatgaacctgaatt

SEQ ID NO: 3598 - DNA, 200 bp, synthetic construct; identical to SEQ ID NO: 2840
  source 1..200: mol_type = other DNA

SEQ ID NO: 3599 - DNA, 200 bp, synthetic construct
  source 1..200: mol_type = other DNA
gggtgggcgtcttcctgccccatgctcccctgccccccaccacctgcctgcttgcttctctggctgcctggtcagtgcagaggtgccccctgcagatgttcaataaaggagtcaagtgctttcccagctcttttcctgcaccacctgccctgggctgattctcactgtcacccacctattcacctgggttcatccccatg

SEQ ID NO: 3600 - DNA, 200 bp, synthetic construct
  source 1..200: mol_type = other DNA
agggggccagatgttgggtgcagatgtagaagcagccagtcacagacccattctatgcaatggacatttatttgaaaaaaattctcaaaagttttttttttttttttgggggggcggggttctaaagctgtttttaactccgagattacaacttagaggaaccaaggaaataaagcaaataagatttaacaacccaagat

SEQ ID NO: 3601 - DNA, 200 bp, synthetic construct; identical to SEQ ID NO: 2797
  source 1..200: mol_type = other DNA

SEQ ID NO: 3602 - DNA, 200 bp, synthetic construct; identical to SEQ ID NO: 2719
  source 1..200: mol_type = other DNA

SEQ ID NO: 3603 - DNA, 200 bp, synthetic construct
  source 1..200: mol_type = other DNA
cctctctggccttgtgcagccagttcctgtgctgccctgcacctaggagagtctcagcccctcacagcttgggatgttaccttgccttttgtttgttttgagggaagtttaatctttaaactctttggaaataaataattatagctttcatttgttgagcacatgttatatgccaatgtgatagaacctttacatacata

SEQ ID NO: 3604 - DNA, 200 bp, synthetic construct
  source 1..200: mol_type = other DNA
gtaaagaccattaaaaaaaaaacagaggaaggtatttctaattccttgggctacaaaagtgtttacttttcagatatatcagtggtatatgtgaccttcaccttgccagtgggggctatgatgagtcaccttaaggagcgtgtgaggtggtcatgaggatgggcataatgaccctgcagggcctagtcaaggatgggtca

SEQ ID NO: 3605 - DNA, 200 bp, synthetic construct
  source 1..200: mol_type = other DNA
ctgttgtaggtaactctaattgagcccgaaaccagaataaaaactcttacattggaaacatttcaaaaccattggattgttggattatttgttaccatttttctctgaacacattttagcaatgacatatgaaagtattcagttgtgtttactaacttcaaaaatgaaatcgctccatcaaatttcgtttttctagtcgg

SEQ ID NO: 3606 - DNA, 200 bp, synthetic construct
  source 1..200: mol_type = other DNA
tgggtggtagcctaatttgtattatgtctactttaagtgaatattggattttttttaaaagatcacttttataatgtatgaatttaacaataaacttttatatttctactaatttatggatccatcattcagttgtgggaacaatcctaaatatttttgtaaatatattactcagcagatttacaatgtttctttcaagt

SEQ ID NO: 3607 - DNA, 200 bp, synthetic construct
  source 1..200: mol_type = other DNA
ataaatggaatgaaataattcaaacacaaactccgtacgtcttctcttatggaagtggctgtgtctttttgagggactctgttctttgcctcagttgtctaccaaaggtgccacatttatagtggctttgtagtaaaggactaaagtcttacattctgttttttttttccctaaaaatcagtgacaacagtagatgtgcc

SEQ ID NO: 3608 - DNA, 200 bp, synthetic construct
  source 1..200: mol_type = other DNA
cagtggcagcctctagccctcagcttcccacggaatcagatggatcctccacgattacgtgaataaaatgatggaaccaaaaatcactgtcactttacaacttaggttttactcttttctttctacagaccatatttttaaagaaatgtttatacaataatttaaatattttttaaaaccataaaataaatttttataag

SEQ ID NO: 3609 - DNA, 200 bp, synthetic construct
  source 1..200: mol_type = other DNA
aatttggatatagacagtccttaaaaatcacactgtaaatatgaatctgctcactttaaacctgtttttttttcatttattgtttatgtaaatgtttgttaaaaataaatcccatggaatatttccatgtaacttagttgttataaatatttcaacaaaatatacaaccccataaggtccctatatagcaggctgattgg

SEQ ID NO: 3610 - DNA, 200 bp, synthetic construct
  source 1..200: mol_type = other DNA
gactcctctgacggcaggaaaactggacatgaatgactgcccccacgcccctcccctgcagagtggccagatggagtcctgagccctggacatgggcccggctttcctggatatcaggacttccaataaataaagactctgtatactgggctttgattcctgccatccgtacctgagagggtcctaggagagctggctgg

SEQ ID NO: 3611 - DNA, 200 bp, synthetic construct
  source 1..200: mol_type = other DNA
aaagcaaaaagatctgggatatgtgttggaaaactgctttcccttatgttcactgtgccataatgctgctcgcaggaaatggcattttacaaaaaaaaaatgaagaactcaaaaaaactttgaaaacttcagcactgttgcactttatgttttaaaaaatgtcactctttcaaaatctataactcatgtatttgaagact

SEQ ID NO: 3612 - DNA, 200 bp, synthetic construct
  source 1..200: mol_type = other DNA
gaccctccctgcagggctgggcttttgcatggcaatggatgggacattaaagggacatgtaacaagcacaccggcctgctgttctgtccttccatccctcttttgggctcttctggagggaagtaacatttactgagcacctgttgtatgtcacatgccttatgaatagaatcttaactcctagagcaactctgtggggt

SEQ ID NO: 3613 - DNA, 200 bp, synthetic construct
  source 1..200: mol_type = other DNA
gggagggtgtggtgggttctcccctgccacccccgggatggctgcttccaagttgtttgcaattaaaggttctgtataaaaccaagccctctgtgtgtcgtgcagcttagctctgcctacaggagccggtgggaccctagagcctgcatggacagcggtggggtgccagcctgccctgctgctggtgtggggttgggtgc

SEQ ID NO: 3614 - DNA, 200 bp, synthetic construct
  source 1..200: mol_type = other DNA
agtgttttctagaacaacttaagcaaattatactgaaagctgctgtggttatttcagtattattcgatttttaattattgaaagtatgtcaccattgaccacatgtaactaacaataaataatataccttacagaaaatctgatataatttttcagagtctgtggcactaaggagtccacagggctgcctaggtgctttg

SEQ ID NO: 3615 - DNA, 200 bp, synthetic construct
  source 1..200: mol_type = other DNA
ttcatataagacagatggatgatctgtgaacataagtgtttattaaaaatggcaattaaatataaattacttttgtgggggaatgcctaataaatacattgactatatataaaatgaatatatacatacacatgtatgcctgtatatatatattcattctccagtgttgctgaattaaaattctgctggactttttaaca

SEQ ID NO: 3616 - DNA, 200 bp, synthetic construct
  source 1..200: mol_type = other DNA
tttttatttaaaatgaatgttatcgtgtgttacatttggacctattttaataaagtggcctgtctcaattaaaaaataggtacaaatgtcctaaggtgggaacatgcctggcatgtttgagaataacaaaggatccagtgtggctggagcagaacaagtggggagtggggtgggagtgtataagagaaaagataagagat

SEQ ID NO: 3617 - DNA, 200 bp, synthetic construct
  source 1..200: mol_type = other DNA
atgtcagcaattgaaaagtgtatcacttaagattaggttcagcagcataaaactaaaaccccaaataccagaggcttaaaaaaaaaaaagagagagaatttttttttcctctcacatgaaagaattccagaggtaagtatttcagggttgctgtgttagtctaccaacctcagcacttggcattcaacccatgatccaag

SEQ ID NO: 3618 - DNA, 200 bp, synthetic construct
  source 1..200: mol_type = other DNA
aagccccgcaaacaaaagtcgtttaaaacctatttaaaatgaataaaaaattggtttactaaactactggtctccagcaccattttctgttttctgttgtttggatgcaggttcttctttgtctgtttcttctcttgctcttttcacaggtcctataacgtaacaattaatttttgttaaattcaacgtaagtactgctc

SEQ ID NO: 3619 - DNA, 200 bp, synthetic construct
  source 1..200: mol_type = other DNA
tcctgaaaaggggagtgtaactagtggatttgggaaaggttcttaagtagatcctgagtctatttgcatgcttctgtctaaatgataattaaaaggaaatttcatggattaaaccatgggtttaatgcagcaaggaaacttacaatgtccctttatatataacatgcatcttgttttggatttgtgtcattttttaatat

SEQ ID NO: 3620 - DNA, 200 bp, synthetic construct
  source 1..200: mol_type = other DNA
ctgggaatgtagagctagccaacatatcacattctgaatgaataaataactatgcacaattatgtttcttatagctatgtgtggtttctgggtcaactgaaaacctaccatttgcttttctattcatctttataatggactttcagaagtgcattagacaaggcccctaaccactttgggatcctttctgttttgctgca

SEQ ID NO: 3621 - DNA, 200 bp, synthetic construct
  source 1..200: mol_type = other DNA
atgaaaaatgaatacaccgtgttggtgttttaggtgcagttgtgccacaaaccttccctaaattatctaggtttgctttgatgaattaaattaaaatgagaaaagcaaaaagaaattaacctgtctgggtatcatattccctatctataaagtagcaattataacagtagtgtctatttcttaagttgtcatgaaaatta

SEQ ID NO: 3622 - DNA, 200 bp, synthetic construct
  source 1..200: mol_type = other DNA
gctgtaggatgacaacactttgactgtggaggtgctagtttgaataaatgtgacaaaagcaaaaactggtgtgaaaaagtacaaataactatctggatttaaaaatgtgtctacgataatgtcactattataagaacaactaggatgaaatgcattttaagtacttctatgttaacagcaatttctgtttagtcttagat

SEQ ID NO: 3623 - DNA, 200 bp, synthetic construct
  source 1..200: mol_type = other DNA
gataatacctggaagcatcatagtggtttcttaactctccaaaataagatttcttctctgtagcctacttgtctggtttatcccttacagaatattagtaagatttaatcaattaaaatatatatatatgccaatctgcttttgtcattcttaaaaaaaaaaaagtgtctcaagccatatcagatttggtttagaataca

SEQ ID NO: 3624 - DNA, 200 bp, synthetic construct
  source 1..200: mol_type = other DNA
atccatcctggatcatggcatttaaataaaagattgaaagattacctttggctcttgagtatgttacataggagggtggtgtatatattcctttcattttgggggaaggaattaaatgaatatgtgattcctaaataccccaaatttggtttggcattgttgttagaaaattgcagtgcaggccaggtgtggtggttcat

SEQ ID NO: 3625 - DNA, 200 bp, synthetic construct
  source 1..200: mol_type = other DNA
gtgaaaatcaaccttttcatattaggagtcatgcatttgtaaaaattaataaagatgacaagtcagttgtcaatggaattgagctatctgctaagacaaaaaatgttacctcagttcactattaaaattaattttaggagtggaagaaatgttgttactgccatttaaaaatatgctgagaaaattccagaagggttatt

SEQ ID NO: 3626 - DNA, 200 bp, synthetic construct; identical to SEQ ID NO: 2782
  source 1..200: mol_type = other DNA

SEQ ID NO: 3627 - DNA, 200 bp, synthetic construct
  source 1..200: mol_type = other DNA
aatagcttaacactaccaatttcccattttggaacctaataaatatttagtctgcattgctggcaattgctgacttctgtcattctttcattgtgcaaatcagttcacctttaaatgctccttgtcaaaagttaagaagtgaatggggtgggggacggggtctattggagaagagcttcaaggtagagtgagtttgaaca

SEQ ID NO: 3628 - DNA, 200 bp, synthetic construct
  source 1..200: mol_type = other DNA
tatttctcatttagcattgaaataataatatttaggcatgagctcttggcaggagtgggctctgagcagttgttatattcattctttataaaccataaaataaataatctcatccccaaactgtagtaattgttacaattttctatttaaaaaatgaatagtacatgcagaaattgacctgatttccatttgcaacagga

SEQ ID NO: 3629 - DNA, 200 bp, synthetic construct
  source 1..200: mol_type = other DNA
tttaccacacactgttttttggcttgcttatgtgtaggtgaacagtcacgcctgaaactttgaggataactttttaaaaaaataaaacagtatctcttaatcactggatccatagtttttggtagttgtgttttatgttaaagatgcaggctctttgaactgacacatgacacataacacataaatgaggaattccagag

SEQ ID NO: 3630 - DNA, 200 bp, synthetic construct
  source 1..200: mol_type = other DNA
ggaagggcctctgctgactcctaccagagcatccgtccagctcagccatccagcctgtctctaccgggccccacttctctggatcagagtccctgcctctgtttgaccccgcactgactgaataaagctcctctggccgtttatgattatctcattccatatctcagggcgaggcaggaggaaatggctcaacacaccaa

SEQ ID NO: 3631 - DNA, 200 bp, synthetic construct
  source 1..200: mol_type = other DNA
gctccacggccccagacaccttccctgaggacactcaataaaggttcctgaatcttcctgcccctcttgcctccttggtgtcttgctttgtgatctccatcctcatctttctgaaggtccctccctgccaagctgaccctccccacaggctccagcatccttggctacgaagtgtaagctggctgaggttgtgtgtgggt

SEQ ID NO: 3632 - DNA, 200 bp, synthetic construct
  source 1..200: mol_type = other DNA
ggatcttggcagttgataaaacgtacaagtggtgtgtttctctctcctctctaacctcaaacaggaaagccgtgtcaagaatgctcatctgacttatgggtagaggcccgctgcagtaccccatcccacaaagccacagtgatcctcgcacagtccacatttttatttccccaaaagatgtttttcggaaaggtcccttt

SEQ ID NO: 3633 - DNA, 200 bp, synthetic construct
  source 1..200: mol_type = other DNA
gccctcttggaaagacttctctgccatccctttgcacctgagaggggaagttctcagctgagctgaagctggattattaaagtggattgtcactcagactctccgtgctacgcttatttggagtctagaggagtgggagttgagcctggcttgaacctttggaaccagaaaagttggggagcaggtggaggaggccacac

SEQ ID NO: 3634 - DNA, 200 bp, synthetic construct
  source 1..200: mol_type = other DNA
agattggtctctgtggtgtgattctcttcccaggtgtccctttctcctcccctagtgtccttaagtcctcctccacagggaacatctatttgggctttgatgtttaataaagtagaaagcactgtctggctgtgtgggtagagtccatcctttccctgcatattaggccagcttgtgccatataccagtgtggtgtctgt

SEQ ID NO: 3635 - DNA, 200 bp, synthetic construct; identical to SEQ ID NO: 2751
  source 1..200: mol_type = other DNA

SEQ ID NO: 3636 - DNA, 200 bp, synthetic construct
  source 1..200: mol_type = other DNA
gcgaataaaggggccgcgcccggccgcggcgcgactcggctgcactcctcacgcgcctgtatgtccgcgcgtgcgtgtccgcgcatgcaggtgtgccagagcgtgagcgcgcgcaggcgagcgctcagggcgggggtgcgcgcggggccgagggtgggtgccgtgcacgcgcgcgggtccggaggcgcgcccgaattccc

SEQ ID NO: 3637 - DNA, 200 bp, synthetic construct
  source 1..200: mol_type = other DNA
gatgtcggctcaggatgccggaaaatgacctgtagttaccagtgcaacgagcaaagccccacagtttagtcctttggagttatgctgcgtatgaaaggatgagtcttcttccgagaaataaagcttgtttgttctcccctgggtcatgagttggttgatttgttggggaggctgagttgatgacatgacacaagctgcca

SEQ ID NO: 3638 - DNA, 200 bp, synthetic construct
  source 1..200: mol_type = other DNA
ggggtggcgcgcggccaggagcacgcatggtattgacttaaaaggttcattttgtgtgtgtgcacattgtgtgttttgtgtactcctgtgggactcccatggttgtaaataaaggtttctctttttttttcctagtcttttgagttattatactgtgagcacctcttgacccttcagagattgtgtttgcttttgaatat

SEQ ID NO: 3639 - DNA, 200 bp, synthetic construct
  source 1..200: mol_type = other DNA
atggtgtccagcctggtgcccgcccaccccgccaggctgcactcggtcgggcctccacaggcatggagtccccgcaaaaacctggcccctgcaggagtcaggcctggtctcacgctcaataaactccggactgaagatgcacaaccagcgttgtgggttgtctttcaaggacagctgcgctcaggccccacttactttat

SEQ ID NO: 3640 - DNA, 200 bp, synthetic construct
  source 1..200: mol_type = other DNA
cattccagcctctgtctcctgctctaggatccccgactcattaaagcaaagaggcttattctggtgtcagttttctctctacagcccccttcccactttccctccattcaacagtgtctggaagggcaccacaatttcactgcactcgcatttctatggtagaaatgcaaataagataggggccaggaacaagggagggt

SEQ ID NO: 3641 - DNA, 200 bp, synthetic construct
  source 1..200: mol_type = other DNA
actcatcttggccctcctcagctccctgcctgtttcccgtaaggctgtacatagtccttttatctccttgtggcctatgaaactggtttataataaactcttaagagaacattataattgcacctatggatctttatttttagaaaaatctttgatatattgggtgcttaatagagtcaagaagggttgccttggaaaaa

SEQ ID NO: 3642 - DNA, 200 bp, synthetic construct; identical to SEQ ID NO: 2763
  source 1..200: mol_type = other DNA

SEQ ID NO: 3643 - DNA, 200 bp, synthetic construct
  source 1..200: mol_type = other DNA
atgcaaatggacattctctgggaggtggggcataccatagcccaaggtgacatttcccaccctgtgccgtgttccccaataaaaacaaattcacaagagttggttcatgttctttattgaacaccttacatgggtatggacagggcctatgggtggggcaaggcagcaatgacagcctcagtgaagtcatggcaagtagc

SEQ ID NO: 3644 - DNA, 200 bp, synthetic construct
  source 1..200: mol_type = other DNA
tctggctggccccacgcagcgggcccagccgccccccaggtggcctcacattctgctctgctaagtttggagaaaacagaacaataaaccagatgcaggtggtgcccgcccggcctctcacctgcctccttggtgtgagtttgcttttcttagcagttcagcagctctaggggaggctccaaaccctgcccccggggagc

SEQ ID NO: 3645 - DNA, 200 bp, synthetic construct
  source 1..200: mol_type = other DNA
tacctgcggtttaagagccctagggcaggctggacctgtcaagacgggaaggggaagagtagagagggagggacaaagtgaggaaaaggtgctcattaaagctaccgggcaccttagctcatcttcgtgttgtctctgtgccccaggtcctccccccgggggcgggcctcggcccagccctcagttcctattctgcacac

SEQ ID NO: 3646 - DNA, 200 bp, synthetic construct
  source 1..200: mol_type = other DNA
actggatcttgggctgggactggatgtgccaatggcccttcagggcctgcctggcacctcaggtactgggctagggtgtctgctatgcctggtattgttcttgtccattgctgtcaccaataaaggcatggaagaacagagtgacaaattcctgtgtgcagtgggtatcccaaaccatgatcttaagattgggggaggtt

SEQ ID NO: 3647 - DNA, 200 bp, synthetic construct
  source 1..200: mol_type = other DNA
acttgatggctccgaacaccctcgaagcgcgccactcgcttcccccatagccaccccagaaatggtgaaaataaaataaagcaggtttttctcctctaccttgactcgtgtctaagtgccagaaatgggacggggagggggcattgtgggactggaagatcgcgcgcgttggacctgtggcttgttgcgctcagagctgg

SEQ ID NO: 3648 - DNA, 200 bp, synthetic construct
  source 1..200: mol_type = other DNA
gccccgcgctcgccccaccggcgcgctcttcgcgcccgcccctgcagcacggacaataaacctccgccaatgcacggcctcgcgtctgtctcagtctctggcgggaagagggaaagggagagaggtgggagcgcggacccccgccaccacgcccaccggccagtccccggacctgaggtcgtgggcagatccaccccaga

SEQ ID NO: 3649 - DNA, 200 bp, synthetic construct
  source 1..200: mol_type = other DNA
cccttttgagaattgctctgaattttgttctcaggcattatacagttagtaattaaactttaaatgccattactacttgttttttcatatcccaagaataagaacatgtctatgtacccgtttctaggaaggaggagtatatgccttttgtctatttctgacacagatgcatttggtctgtcaaaactgcaaccatgggg

SEQ ID NO: 3650 - DNA, 200 bp, synthetic construct
  source 1..200: mol_type = other DNA
tatttattcagtgttaatgtcgtccagaattttcatcagaaatggatagctttaacatctaaaattattatattttgaagcaagaagcactctaagctatttactaataggcttttcatataattaggaaaacctaatatcacatctatagtaaccatttcagtttcatattgtttctgttctcataaggatactgctga

SEQ ID NO: 3651 - DNA, 200 bp, synthetic construct
  source 1..200: mol_type = other DNA
gacttggatggcagccatcagggaaggctgggtcccagctgggagtatgggtgtgagctctatagaccatccctctctgcaatcaataaacacttgcctgtgatgcctgccgtctggagtctctttgtcccggcacaggagtcattttgcccctggcaggcttggggactggatggctgagccacacctgggtcatgttc

SEQ ID NO: 3652 - DNA, 200 bp, synthetic construct
  source 1..200: mol_type = other DNA
cgcttggcccggaccccgcccaataaagagtgcgtggcaaccctggcgcctgcgaaccctgtcggaggcgtctgggcgcggagtcggggtgggcaaagctcagcctaggagccgcagaggggtgaacggggcgtgatgaaggcagagccatcgccacggtctggagccagggctgtcttttgctttctccttccttgtgc

SEQ ID NO: 3653 - DNA, 200 bp, synthetic construct; identical to SEQ ID NO: 2720
  source 1..200: mol_type = other DNA

SEQ ID NO: 3654 - DNA, 200 bp, synthetic construct
  source 1..200: mol_type = other DNA
gtaagagcacaggggtccttatttaggacaaataaaggatggtggattgggcgctgtgctttctgaatgaccaccatgggagctgtgggacttggaggaagggggcctggagggctgagctgtgggtccacagaggtgtttgggggacagcaatgggggcacagtctcccttgatgcttgagggctgggctgagtgaatg

SEQ ID NO: 3655 - DNA, 200 bp, synthetic construct; identical to SEQ ID NO: 2854
  source 1..200: mol_type = other DNA

SEQ ID NO: 3656 - DNA, 200 bp, synthetic construct
  source 1..200: mol_type = other DNA
ccactgaatttctaagactgttgaactccagtttgggaactataacacagcagaacagtttgataggtgatcactgtaaaaataaaaacaaatcactcccaagagcttactgtttaatcaccagaatagaagaaacacattataacccatttgatagaagactttgggctatctagtgaaatgggctcccagacacaatc

SEQ ID NO: 3657 - DNA, 200 bp, synthetic construct
  source 1..200: mol_type = other DNA
aatagttcagagttcatagtcatattcatagacacagaatcaagcttttaacatatacatccacctctatatgttaaataaaacatcagattatcaacactgtcattacgtagaaactttggttagccaagcagtgcattgtcagttacgtcatctctaaaaatgacctgtgtctgttctctggggattgctgggtcaca

SEQ ID NO: 3658 - DNA, 200 bp, synthetic construct
  source 1..200: mol_type = other DNA
actgccagctgaggaaggagcacacgcctcatcaatgcatggaagaacgtgcaatgcatcagaataaaagacatgcaaagtaaactaccctgggctacctctttttttaacctggcagattgataaatatcaaaaggcttaaaatactctgctggcaaaggtagggcaaaatgggcactttcataacattggtgagaatg

SEQ ID NO: 3659 - DNA, 200 bp, synthetic construct
  source 1..200: mol_type = other DNA
ccagaggtaccagcttcgcctggggcttcaagaacctcccatctatccccattcctgagtcaggagttacagtcccttttggccctcacatccaataaagagtctgataccactggagtggctggcttttaattcccctgggccagacctgcagccttgccttcatcccttaactccaggactccaggggcagagtccct

SEQ ID NO: 3660 - DNA, 200 bp, synthetic construct
  source 1..200: mol_type = other DNA
agacccacagtgcaccagagcacagctgcatcctggagccccagacctgtggctggctggtccgaagttggccacattgctgccagccaagaccagaaataaacagccgatgctgacatcttgatcactggaaggtctccttgcccctacagcctatgagagtcacttcgtttagaatcactgcaggtcagcaggtcgga

SEQ ID NO: 3661 - DNA, 200 bp, synthetic construct
  source 1..200: mol_type = other DNA
ccacgcgccgtcctccgaggaactgggcgcttgcagtgcgttgcacaccctcacctcccacccactgattattaataaagtcttttcttttacctgccaatgcttagtttctttgcccaaagggagtttcggctggacaggtgctagcgtggggagctgctgtagggtcccagagtcagttagttatttgacctaacaac

SEQ ID NO: 3662 - DNA, 200 bp, synthetic construct
  source 1..200: mol_type = other DNA
agatgattttctaatatttatccactaataaagaagagtgtaaatgcacatatggaattaaagaagcaaacctatttatgttttaaaggcagcagccaccagtgtttttcctggctcaaaacatgccaagccccaggccttctgctcctgctctttcccagggggagccacaggccggacctcccaagacagctgagcct

SEQ ID NO: 3663 - DNA, 200 bp, synthetic construct
  source 1..200: mol_type = other DNA
tgagcggttgccatggccggtctccgtggggcagggttgggccgcatgtggaagggctctgagctgtgtcctccttcattaaaagtttttatgtctcgtgtcagaacaggcagcctgctggttttctctggggcccttctctggctcctgcttctgctgccccagtctggcctgtcctggcctgtcccatgccgtcctgg

SEQ ID NO: 3664 - DNA, 200 bp, synthetic construct
  source 1..200: mol_type = other DNA
taactttctaaaatttaaatatgtataataaaataaatgttttaaatataatgtttgtgtgtgcttatacagattaaccctttctccccaagattgatagtgatctttactttttcttttctctaaagtatgaaacacttcatgttgcttaagtaaaaactgtacaaaaacaggtcactcccttcctgctccatggatgc

SEQ ID NO: 3665 - DNA, 200 bp, synthetic construct
  source 1..200: mol_type = other DNA
ctgaagatcaaagtaaagcaacagaggaatgtacatctacctaataactttctaaaatttaaatatgtataataaaataaatgttttaaatataatgtttgtgtgtgcttatacagattaaccctttctccccaagattgatagtgatctttactttttcttttctctaaagtatgaaacacttcatgttgcttaagtaa

SEQ ID NO: 3666 - DNA, 200 bp, synthetic construct
  source 1..200: mol_type = other DNA
cgtgtctatgtcaaaagttcttatatatttcttttataagctgaaagaaggtctatttttatgtttttaggtctatgaatggaacgttgtaaatgcttgtcaaacaataaaaataacgaaaagtgtctgggcggttctatgcctttttggatgggaggatgagtatgaattgttggcgggagagcggccgtgggagaaga

SEQ ID NO: 3667 - DNA, 200 bp, synthetic construct
  source 1..200: mol_type = other DNA
aagtgttggttttctgccatcagtgaaaattcttaaacttggagcaacaataaaaagcttccagaacagatcatattatgttcactgtcttttaaactggaatgtagaaggctttatttttatgtccttttttggtatcccctgagtataaaggccaaaaagcccttttggcctagagaatttggtttgagtagattatg

SEQ ID NO: 3668 - DNA, 200 bp, synthetic construct; identical to SEQ ID NO: 2765
  source 1..200: mol_type = other DNA

SEQ ID NO: 3669 - DNA, 200 bp, synthetic construct
  source 1..200: mol_type = other DNA
tccacatggtcttcgtccttgacgtcgttttacaagaaaacaatggggctggttttgcttccccgtgcatgatttactcttagagatgattcagaggtcacttcatttttattaaacagtgaacttgtctggctttggcactctctgccattctgtgcaggctgcagtggctcccctgcccagcctgctctccctaaccc

SEQ ID NO: 3670 - DNA, 200 bp, synthetic construct
  source 1..200: mol_type = other DNA
aagttcatatctggagcctgatgtcttaacgaataaaggtcccatgctccacccgaggacagttcttcgtgcctgagtctttctgaggttgtgctttatttctgctgcgtcgtgggagagggcgggagggtgtcaggggagagtctgcccaggcctcaagggcaggaaaagactccctaaggagctgcagtgcatgcaag

SEQ ID NO: 3671 - DNA, 200 bp, synthetic construct
  source 1..200: mol_type = other DNA
ggccctcggtgtgaagatgaaccttccaccgtcttcactgcatcctggagtgcaaaaataaaatccactcaagagtcacaaggcccgctgtgcataatcggtttcacttttacctttttttttttttttttttttttgagtcagggtctcactctgtcacccaggctggagtgcagtggcacattctcggctcactgcaa

SEQ ID NO: 3672 - DNA, 200 bp, synthetic construct
  source 1..200: mol_type = other DNA
gccatgccatttttaccttatgtctgctagaaagtgttgtagttgattgaccaaaccagttcataaggggaattttttttaaaaaacaacaaaaaaaaaaacatacaaagatgggtttctgaataaaatttgtagtgataacagtattcttggtgtaacttatttcttgtggaagttctttaaatttctttttctttata

SEQ ID NO: 3673 - DNA, 200 bp, synthetic construct
  source 1..200: mol_type = other DNA
taaaatgtcatggctctttcctgcgacaattctatttgaggaaaagatttgtttttcccttttcccaaggaagctcgtgggacagcatgggcactactcttcatgtgcggtgacaccagcccccagatgccttgaattaagtgtcctcacctttatgcatgactgcaaagccagctggagcattttctatggagcctccg

SEQ ID NO: 3674 - DNA, 200 bp, synthetic construct
  source 1..200: mol_type = other DNA
agctggaggcagattcgtcgctttctctggagaaggacagtcattgcgtaaaaagggaagaaagccctaagtgaggactgttggctgattggaaaataataaaagaatcatttgcaacatcttggcttttagttactggcactgacagggacgagcctcatcagagaatactctgttacttaagatttatttagagttac

SEQ ID NO: 3675 - DNA, 200 bp, synthetic construct
  source 1..200: mol_type = other DNA
atttgattcttccagaatgaccttcttatttatgtaactggctttcatttagattgtaagttatggacatgatttgagatgtagaagccattttttattaaataaaatgcttattttaggctccgtccccattgtggctctggtctcgaggccagtgcttgagtgtgctctgagccttctgtgggtcttgggccccagga

SEQ ID NO: 3676 - DNA, 200 bp, synthetic construct
  source 1..200: mol_type = other DNA
tcgtcttattttattttcttttcctctctttcctttcctttttttaaaaaattttaccctgcccctctttttcggtttgtttttattctttcatttttacaagggacgttatataaagaactgaactcaacattcaggttgttttttttttttgtttctaagtttttgccctattgaagatgacttcagaaaatccattc

SEQ ID NO: 3677 - DNA, 200 bp, synthetic construct
  source 1..200: mol_type = other DNA
ggggctgctggactgaccgaggggctgcccagcaagactgcagcctcttcctccctcagatcccaccagacccaccaggtgccataataaagcggattctagacggagggcctgctgtctggctcagctgggggctggagcccctctgagtactaagcttgctgccccagacagtggctgcagctcctagagggctcagt

SEQ ID NO: 3678 - DNA, 200 bp, synthetic construct
  source 1..200: mol_type = other DNA
gcccttcattcacctctgtgagtgaataaatgtgctaagtctctttatctcgggtccgaatggcactttctgttcctggagcacagtcacatcttttcttgctctcctgccagaggggaaatgcgaggcccagaagcaccgggtctgggtggcacaggctgaacccagtgcggggaatgggtgggaggtggccttggagt

SEQ ID NO: 3679 - DNA, 200 bp, synthetic construct
  source 1..200: mol_type = other DNA
taaggggatggattgcacactgtagtgagtcatccatcctgaccccacctcatcagccagggagctccctgaagacaggccatcgagagaggcacacaacaggctgtggtctaaaataaacttttaattgcacatttgtgtcttgggttatctgtggggtgagaaacctcctcacttccaatcccagctatctgggtaca

SEQ ID NO: 3680 - DNA, 200 bp, synthetic construct
  source 1..200: mol_type = other DNA
gggatggattgcacactgtagtgagtcatccatcctgaccccacctcatcagccagggagctccctgaagacaggccatcgagagaggcacacaacaggctgtggtctaaaataaacttttaattgcacatttgtgtcttgggttatctgtggggtgagaaacctcctcacttccaatcccagctatctgggtacaatct

SEQ ID NO: 3681 - DNA, 200 bp, synthetic construct
  source 1..200: mol_type = other DNA
gagtcatccatcctgaccccacctcatcagccagggagctccctgaagacaggccatcgagagaggcacacaacaggctgtggtctaaaataaacttttaattgcacatttgtgtcttgggttatctgtggggtgagaaacctcctcacttccaatcccagctatctgggtacaatctggtgttgtggtctggctgtcgg

SEQ ID NO: 3682 - DNA, 200 bp, synthetic construct
  source 1..200: mol_type = other DNA
aggcacccagacttcaaggacccagacccaccctggggggctgcaagggcaagaagaggaggctccagggttggggcgagggccgacctgtccacccttccctggaatctgctcaataaagcctggggttggtcccccacccgccacgttcctcggcatcacttcctgagggagccaggcctggggcgggacctgtggga

SEQ ID NO: 3683 - DNA, 200 bp, synthetic construct
  source 1..200: mol_type = other DNA
actgtggcaggtccagaaccagtcagagtcttgcccctaagagggatgtactgtaaataaacagtatttttagatcaccttcaaaagggtaacttctttactcaggagctactccacatcaggccaggtcatgagggaaggatgtaaaatgggacaatgccacgtagggcaggaatctttataccaagtcctcatgtggg

SEQ ID NO: 3684 - DNA, 200 bp, synthetic construct
  source 1..200: mol_type = other DNA
ctgtggcccagggctgaggctggatgggaggtggctggcagcccacccactgtaataaagccccagccattggcccacagcaatctttgcctcacagtatgactgagccaaggaaagaacccttccttccctgtcctgggcaggggccactgagtccccagccatgtagttcagtcagtcagcagagtcctggcactatg

SEQ ID NO: 3685 - DNA, 200 bp, synthetic construct
  source 1..200: mol_type = other DNA
gtgttcgcaccaggaacgcaggtgctgggctgtcggggaggcctcaggccacctccaggaacagaacacagttttaagtttgattttttttatttcaaaatgctttgcaattaaatgaattactgttcagaagtctcccacttttcatacaaaaatactgtgctactgatacagttgaaaaaattcaatgatgtctctcc

SEQ ID NO: 3686 - DNA, 200 bp, synthetic construct
  source 1..200: mol_type = other DNA
accagtgatgtggagctggagtttgtccttccaccgagtctacgagggcctttgatgcttagtggaatgtgtgtctaacttgctctctgacatttagcagatgaaataaaatatatatctgtttagtctttccctcatcgtctgcctgcattaacgatttacagtcgtttcttcaaagattcctgacagagtggggatga

SEQ ID NO: 3687 - DNA, 200 bp, synthetic construct; identical to SEQ ID NO: 2842
  source 1..200: mol_type = other DNA

SEQ ID NO: 3688 - DNA, 200 bp, synthetic construct
  source 1..200: mol_type = other DNA
atcagccagcccatggcccccaataaaggcagctgcctctgctccctctgaaccagcctcgtgtgtgtgcttgtgcgtgtgtgtgtatgtgtgtgcatgtgtttgtgtgtgtgagaggggtcccccacctccaggcctgcccccttccttcacttccattcgctttgtccacgggtacctcctcagttccaatgacgtct

SEQ ID NO: 3689 - DNA, 200 bp, synthetic construct
  source 1..200: mol_type = other DNA
ccctgccgcctggactccgcctgtgtccgtctgtctcactcccgttctccgaaggcgggacgccaccgggccagggatggggcaatgccacgagctctctgaggggcgttgagtggagcgacttgtccccgctccacagcggagcaccagcccagtggacacccctgggtgtgaatatgaacagcacagcccgcccccag

SEQ ID NO: 3690 - DNA, 200 bp, synthetic construct
  source 1..200: mol_type = other DNA
tgccaggaacagattttgcagttggtggggtctcaataaaagttattttccactgacatcttgcctctttcttcaggagagaggctgggactggggaggcagatgggggcccttgaggtgccttgtgctccccaaggccactgccctcctttctgtagcttcgctgggtttgccttctggcctcccactctgtcccccac

SEQ ID NO: 3691 - DNA, 200 bp, synthetic construct
  source 1..200: mol_type = other DNA
tgaggatagtcaggagcgtcaatgtgcttgtacatagagtgctgtagctgtgtgttccaataaattattttgtagggaaagtacttgtgcgtttgaattcctttcctggcaaagtaaccgagtgaagcgccacccacccaccccaagctggtcttaacatttcctgtgagatctgggggaggaggcagtccaaggctgaa

SEQ ID NO: 3692 - DNA, 200 bp, synthetic construct
  source 1..200: mol_type = other DNA
cttagaactttcaactctgacctcgtgaccttttttggaacagcagcagcactaacttgaccttttcgttttttttttcaacttgcaataaatacatttttaaaaggaaaaaagaaaacggagagaaaaaaaggtgggtcattgacagactgtctgagcacatagttgcctcccttataacttcagttttttcgtttgga

SEQ ID NO: 3693 - DNA, 200 bp, synthetic construct
  source 1..200: mol_type = other DNA
gtcccacctggaccttatcaaaactactcactccacctgggcccctgctgaagccctattttgaaatttcccttttgtagagcttttttcctttcctaagccctgtaaataaacgaaggcacttctttggaaggttatggagtctgtttgactagtgctaaaggaaacaattcatgcggatgtataaaactcgctctttt

SEQ ID NO: 3694 - DNA, 200 bp, synthetic construct
  source 1..200: mol_type = other DNA
cgacacccctacaggagaagctctgggactggggcagcagcaaggcgcccatgccacacaccgactctcgaggaaacgcggttcagcgattctttgactgcggaccctgtgggaaaccccgtcaataaatgttaaagacacactccgaggcagcgtggatgtggtttgctttcactcaacagtatggcccgcgtggcctt

SEQ ID NO: 3695 - DNA, 200 bp, synthetic construct
  source 1..200: mol_type = other DNA
gctgctgccgcccggccacggcccaccctggtcaggctgcctccttaatcgagaaaactacctggtgatgcaatcttttttttttttaatttaatttaattttaaaataaatgctgcattggtaaagctggcagttgaaaccagttggacggcccagcttgcgactcttctgcctgagtgggcctctcaggtcactcgtg

SEQ ID NO: 3696 - DNA, 200 bp, synthetic construct
  source 1..200: mol_type = other DNA
tggggagcaccgaggcaggggtgggggaatgtgtactgaggagccgtgtgtctgctcctggctggcccggcctaataaagcagtgttgccatctcatcttccccctaaaaacccttttatgtacacctgcgcagagaagagggctgcctggcctccctgggccgctggtacagatcacacacacacacagattaaacgca

SEQ ID NO: 3697 - DNA, 200 bp, synthetic construct; identical to SEQ ID NO: 2752
  source 1..200: mol_type = other DNA

SEQ ID NO: 3698 - DNA, 200 bp, synthetic construct
  source 1..200: mol_type = other DNA
gccccactggcccaccacagctgccatgccaccctctgcccgtatgaagaggtcactgggggatggagctggcacccacatgaatagctgtatgcactgtacttgtttcttaataaacttatttttaagcacagcccgaggacctcttctctcctgtgccatgatccacccagctgcatatcaaaccttgtgaacaaaac

SEQ ID NO: 3699 - DNA, 200 bp, synthetic construct; identical to SEQ ID NO: 2715
  source 1..200: mol_type = other DNA

SEQ ID NO: 3700 - DNA, 200 bp, synthetic construct
  source 1..200: mol_type = other DNA
tcgcccacaagccttactcacctctctctaagtttagaagcgctcatctggcttttcgcttgcttctgcagcaactcccacgactgttgtacaagctcaggaggcgaataaatgttcaaactgtatgctgatgttccaaatgggaatttatttcaaagaggaaaagttaatattttactttaaaaaaatcaaaataatac

SEQ ID NO: 3701 - DNA, 200 bp, synthetic construct
  source 1..200: mol_type = other DNA
ttttgcttgcttttatatatgttatgtgtagatgaataaagtgtttgatcctttttgacagaacagtgtttgttactttgacccattgcttgaattcaaagataccctggtttgcataatacttggttttttaaatgtatgcatcagacatttatccagttgggacccaaatatattagagggcttagcatcagaagaaa

SEQ ID NO: 3702 - DNA, 200 bp, synthetic construct
  source 1..200: mol_type = other DNA
ggccacttccaggtgggcagcagaggcaggccccagtgtgaccaccactgcgacccctgagcccacaagggcagagcagcattctgagagtcgcacaggagtccaagccagaccaataaacagaacacttttccttccatgtggtctgaatgttggcaccagcccgggcaggggcatctcatttgggcagtactgctgtg

SEQ ID NO: 3703 - DNA, 200 bp, synthetic construct
  source 1..200: mol_type = other DNA
gcagctcatgtgcacgttttctgtttaaataaatgtaaaaactgccatctggcatcttccttccttgattttaagtcttcagcttcttggccaacttagtttgccacagagattgttcttttgcttaagcccctttggaatctcccatttggaggggatttgtaaaggacactcagtccttgaacaggggaatgtggcct

SEQ ID NO: 3704 - DNA, 200 bp, synthetic construct
  source 1..200: mol_type = other DNA
ataaagacgccagttggtggtcttgagttttctctttcttgcaagatgaaattttattttccacagcaaaattactctactgttaaaattgtgcaaaataaaataaacatttaaaatgacattttacagtaaaggaattgattaaaaacagaaaaagttagaaaaagtaacagaaaaagttattctgccacaaaactact

SEQ ID NO: 3705 - DNA, 200 bp, synthetic construct
  source 1..200: mol_type = other DNA
acatataatttgtaattaaatactgatttttaaatgctatatgtgaagaaattatgcatttatgtattgatacccagatatactttatgttagggtttctccaccttggcactattaatatttgggtaagataattctttgttgggaaaagggggattgtactgtacattgttgggtgtttaacaccatcctgattgctt

SEQ ID NO: 3706 - DNA, 200 bp, synthetic construct; identical to SEQ ID NO: 2747
  source 1..200: mol_type = other DNA

SEQ ID NO: 3707 - DNA, 200 bp, synthetic construct
  source 1..200: mol_type = other DNA
gagggagcgggtagagggatgggctctgctcagctattcttgggccagatggggcctgaccgatagaataaaagacttttctacaacagcttggctgttccctgacccttcttcccacagtcccctggctccacgtccatagtggctgaggagctggaggctctaggcctcaggcaggggagggttcccacccatagggt

SEQ ID NO: 3708 - DNA, 200 bp, synthetic construct
  source 1..200: mol_type = other DNA
ctctgtgtgccctccctcacttgtgggccccccttgcctccgtgcccaggttgctgtgggtgcagctgtcacagccctgagagtcagggtggagatgaggtgctcaattaaacattactgttttccatgcctccttcttccccggcctcagaggccccacgtttcctgggcctgctctgttgggagtccacaggtgaacc

SEQ ID NO: 3709 - DNA, 200 bp, synthetic construct; identical to SEQ ID NO: 2795
  source 1..200: mol_type = other DNA

SEQ ID NO: 3710 - DNA, 200 bp, synthetic construct
  source 1..200: mol_type = other DNA
gtgtgccctaccctggctcaggcttctgggctctgagaaataaactatgagagcaatttcctcaggcttcagtctcacttgttttgcctcctctctctcaccacaactgagcccttagctcagggagtccacgtgtgagtgtgagtgtgtgtgagtgtgacacagaggtggcgagggcagtgttccatccaggaggacac

SEQ ID NO: 3711 - DNA, 200 bp, synthetic construct; identical to SEQ ID NO: 2825
  source 1..200: mol_type = other DNA

SEQ ID NO: 3712 - DNA, 200 bp, synthetic construct
  source 1..200: mol_type = other DNA
ccaagaaggaaaatctgacgaataaagacccccgctgccccatagcactgagtggtcaattggctcctacccttcttggcagcacagacctctgcccacacccagggacctggggaggagggcacagtgtttgtccctcactttccctagcaggatggtcaactatctgagcccagtaaaagtagggaaaacacagagaa

SEQ ID NO: 3713 - DNA, 200 bp, synthetic construct
  source 1..200: mol_type = other DNA
ccgaacatgtgcctctctttgcctgacagcctgaggtcctgggccaggtctgctctttccaggcctgtctggaccgtgtgtcccttttcagcttttagagtcagctgacttggtgtccaggacgggcgggcaggtggggcataggctggctcacactgctccattgcccccaccaactgacctttcctccctaaggatcc

SEQ ID NO: 3714 - DNA, 200 bp, synthetic construct
  source 1..200: mol_type = other DNA
ggccacagaggctccaatacctgggaatgttcacaaagtcatcaactggaaaaaaagcaaaaacccacggccaaaataaattggtactgtttgttacaaagttctgtcttgtcatggggagtcgggcatattcttggcagcactccactcaccttcagctcctgcaccgacatcaggaacccacggccaccacctcctcc

SEQ ID NO: 3715 - DNA, 200 bp, synthetic construct
  source 1..200: mol_type = other DNA
ggtgctccatactggcctggctatgctgggtctccctccactgagccacatttaaggccacagaggctccaatacctgggaatgttcacaaagtcatcaactggaaaaaaagcaaaaacccacggccaaaataaattggtactgtttgttacaaagttctgtcttgtcatggggagtcgggcatattcttggcagcactc

SEQ ID NO: 3716 - DNA, 200 bp, synthetic construct
  source 1..200: mol_type = other DNA
gctggaagcactgaacctacctcatcctcctggagggtgtggctaccctcgccaccccaaattccatgtcaataaagaacagctaaattctcctagagtctgtgtgttatctctgcacttctagcatctgaaggccctgaagacatgctggtggtggtggtatgattgggggatggagatgtgccttttgcacattttgt

SEQ ID NO: 3717 - DNA, 200 bp, synthetic construct
  source 1..200: mol_type = other DNA
cccctgcccaaggcctaccccagttcctagcactgccccacatgcatgtctgcctatgcactgaagagctcttggcccggcagggcccccaataaaccagtgtgaacccccactgtgttgtctggactctgatttggggcgggcgggggagtctccaggggaacctcgaggttgcccccagcagaacccatgcaccgcta

SEQ ID NO: 3718 - DNA, 200 bp, synthetic construct
  source 1..200: mol_type = other DNA
cctgccctccagcctgggacaataaaagccttttttctagactgtcctggctccatacccctgaggcactaagaggcagccccagccctgtgaggcactgcccagggagtcaaatcttctgaagagctttttttctctgtgtgaaggtccctgtcatgcccatgtcacacccgtgtgcattagtgcactgttttctatcg

SEQ ID NO: 3719 - DNA, 200 bp, synthetic construct
  source 1..200: mol_type = other DNA
caaggcagccaccctgtcacctagctcaatggagccccggatcccaagccctgcattgtaagcccacagtaggcactcaataaatgcttgttaaaggaaggcattgcagagaggatggacgatagaaaacagtgcactaatgcacacgggtgtgacatgggcatgacagggaccttcacacagagaaaaaaagctcttca

SEQ ID NO: 3720 - DNA, 200 bp, synthetic construct
  source 1..200: mol_type = other DNA
tgggaatgtgtgcgggctcagccttcctggacacactaggtgtgggaagccataggagcctccagatgggggctggcctctcttgcccagccagcgggcagggactgtgggttggtgaatgcattaaagtgctttggggaagacacttgtcaagctctgtcacttgtcccttcgcccatccaccctcactcacatacaga

SEQ ID NO: 3721 - DNA, 200 bp, synthetic construct
  source 1..200: mol_type = other DNA
aaaggagtcaagttccatgggatacaacctccctcttgttttgtttgtctctccttttcttttgttactgttcttgctgctagaacttttttaaataaactttttttcaatgtgattatctttttgttatttttttttcccagagatgggtgggagtggggctactggtaggagagagagagtgctccctgtctctacta

SEQ ID NO: 3722 - DNA, 200 bp, synthetic construct
  source 1..200: mol_type = other DNA
ccagggcctgtgctgcagtcggggacaaggagcttccgtctggcaaggccggggcacaatttgcactcccctcagctagacgcacagactcagcaataaacctttgcatcaggctccagctgtcctttcttggtggaggacttaattatcacaagtcatgggcatttattaagtgcccagtgctgggttgggcatgaagt

SEQ ID NO: 3723 - DNA, 200 bp, synthetic construct
  source 1..200: mol_type = other DNA
ggctggtagtgactggatggacacattgctgtgggtagtccctcctactaggaggcttgtcatactgtctagaggttgactcttagttctgtaaataaagacatccatttcaaacagcctttattgagtgctgtttctgggccagccgtgggagtcccagcagtgaatgaaatagccacgagccgtgggctagatcgcca

SEQ ID NO: 3724 - DNA, 200 bp, synthetic construct
  source 1..200: mol_type = other DNA
agtggtcttttccagatagtctctgacaagcttcaggtcagagcaatggatggcagatacctggcatttgatataccagctctgaggaatgggcagggcttgtctgaggcctcatgtggagcaggactctgagcctcttttctagactgagcagagtctgtgattgattagcaatgtgtgccgtaggaaggaaagttggg

SEQ ID NO: 3725 - DNA, 200 bp, synthetic construct; identical to SEQ ID NO: 2799
  source 1..200: mol_type = other DNA

SEQ ID NO: 3726 - DNA, 200 bp, synthetic construct
  source 1..200: mol_type = other DNA
ccctggaactcctaaacctttgcccctggggcttccatcccaaccagtgccaaggacctcctcttcccccttccaaataataaagtctatggacagggctgtctctgaagtactaacacaaggacactcgtggagcaagaattttccttttcctggggacatgttaccatctccatttcacagatgaggaaactgagcct

SEQ ID NO: 3727 - DNA, 200 bp, synthetic construct; identical to SEQ ID NO: 2851
  source 1..200: mol_type = other DNA

SEQ ID NO: 3728 - DNA, 200 bp, synthetic construct
  source 1..200: mol_type = other DNA
gggcacctttattgtctgggacaggccctcagcccctcctgccccatccacccagacaagcaataaaagtggtctcctccctgtgcatgcttctgctttcagccccagcctcgtcacttgactgtgaggatcctctgggtgtcagggaagtcctcctccagcagtgagtcctagaagagcagggttggtggtggagggtg

SEQ ID NO: 3729 - DNA, 200 bp, synthetic construct
  source 1..200: mol_type = other DNA
gaggctggggctgaaagcagaagcatgcacagggaggagtccacttttattgcttgtctgggtggatggggcaggaggggctgagggcctgtcccagacaataaaggtgccctcagcggatgtgggccatgtcaccaaggaagggggtcttcatgcagccggtgcagagctggtccatccagaggggtgcctcgtgctgc

SEQ ID NO: 3730 - DNA, 200 bp, synthetic construct
  source 1..200: mol_type = other DNA
ccctctggccagcacgcctgtcctcccccggggccaaggcagaggaggaggacgacatcctgacctgctgctgaggctgtacctccttgactaagctggttccttgtgtcaaagcacctcatgccttccattaaagagaggccgtgtccaccctgagctggctgattttggggagggaggatggcagggaggcagcccaa

SEQ ID NO: 3731 - DNA, 200 bp, synthetic construct
  source 1..200: mol_type = other DNA
ttctgatggaaggagctgtgcccaccctgtacacttggcttccccctgcaactgcagggccgcttctggggcctggaccaccatggggaggaagagtcccactcattacaaataaagaaaggtggtgtgagcctgggaagtgggtgtctccagttccatgtggccaaatcctagggcctcaacctcgcatcctgaacctt

SEQ ID NO: 3732 - DNA, 200 bp, synthetic construct
  source 1..200: mol_type = other DNA
agccatgtaactaacaaaggatttgctttagagataattatttggaatttttatagcttacttcacaatgtgcccaggtcagctgtataaaataaatactgcattgttgtttctttccatttatttttttcttaaacacataggccttctagaatcgggtccacttatgttaaaataatgtcacttgaattattcattaa

SEQ ID NO: 3733 - DNA, 200 bp, synthetic construct
  source 1..200: mol_type = other DNA
ctaggaggttaccaccattgtgatcaagataaatgtggagtattaaagttatgtgttgattgtgtggttcatttttgtatttatttcatttaaaatcatgtgacgcagaatagttttgcaatgtgtatatagttgcaggcaaaaaaaaaaccacctcactgcaaaacttattgttaattttagtcaccaatggtataaag

SEQ ID NO: 3734 - DNA, 200 bp, synthetic construct; identical to SEQ ID NO: 2746
  source 1..200: mol_type = other DNA

SEQ ID NO: 3735 - DNA, 200 bp, synthetic construct
  source 1..200: mol_type = other DNA
acagtcccgagcagccagctgcacaggaaaaaccaccagttacttgagtgtcactcagcaacactggtcacgtttggaaagaatattaaaaagagaaaaaaatcctgttcattttagtgttcaatttttttattattattgttgttcttatttaaccttgtaaaatatctataaatacaaaccaatttcattgtattctc

SEQ ID NO: 3736 - DNA, 200 bp, synthetic construct
  source 1..200: mol_type = other DNA
ataggaaagaaaaacttatccaggaaggaaaattggatcgaacatttcacctctcatattaagtctggcaatgatgactatatgtattcctgcctaaataaatcatctattaatcattaagtagtagtttctctttcttagtattaccttgattcaatgttaaaaactattaacaccctaacaacacagaagcagacgca

SEQ ID NO: 3737 - DNA, 200 bp, synthetic construct
  source 1..200: mol_type = other DNA
gaaatatttagctataaataaaaatttatacagcatgtataatttattttgtattaacaataaaaattcctaagactgagggaaatatgtcttaacttttgatgataaaagaaattaaatttgattcagaaatttcagttgatgttatgtatttgttttttagacagtttatttatataaatttatttattgttttttag

SEQ ID NO: 3738 - DNA, 200 bp, synthetic construct
  source 1..200: mol_type = other DNA
tcctgcctcagaaaaagcttttccattacactgtgaatgatacctgttttgttgtttctgaatttccacatgttctgaagacaaattttttatagccgcttatggccattttgtacaattttgaaataaaattaaaccatttatttggtggtatggtttattttcgtggagcctgtactaaaaaaggtggatactcacat

SEQ ID NO: 3739 - DNA, 200 bp, synthetic construct
  source 1..200: mol_type = other DNA
atttcaataatcagagaagtgtaaaataaaacagattatattgtacttgaccctttatgtctttaaagatagttaatgcaaccctgaggcttggggtctataaataacaaaagcatctggcatttctctagtgcagtgtttctcaaagtggccttcagcctagaaacgtcagtgtcaccaggaaacttgttagaagtgca

SEQ ID NO: 3740 - DNA, 200 bp, synthetic construct
  source 1..200: mol_type = other DNA
gtgcaccctgaagaccacaaattaaataaatatcatgactggctttgggaaaatcatgaaaaattaagtctatcttaaactctgcagctttcaagctcatctgttatgcatagctttgcacttcaaaaaagcttaattaagtacaaccaaccacctttccagccatagagattttaattagcccaactagaagcctagtg

SEQ ID NO: 3741 - DNA, 200 bp, synthetic construct; identical to SEQ ID NO: 2812
  source 1..200: mol_type = other DNA

SEQ ID NO: 3742 - DNA, 200 bp, synthetic construct
  source 1..200: mol_type = other DNA
caaatcaaaggaaaagaaaccaagaactgaattactgtctgcccattcacatcccattcctgccttttgcaatcatgaaacctgggaatccaaatagttggataacttagaataactaagtttattaaattctagaaagatctcttttgtgccttactgtaaaattatttacttttttaaacattttaagttgtattttt

SEQ ID NO: 3743 - DNA, 200 bp, synthetic construct
  source 1..200: mol_type = other DNA
aaacaaatcaaatcatttttactgtgtaaattgtattcttaacattttgtattttgtaggattgatcttattttgagtcaagggttgtaaaatgtatttgctctcagaattcatccccttcttagtattaggtcattcttcatctgtataatttttattaactttgagattcttatacagaaaatagttgcaagggtaag

SEQ ID NO: 3744 - DNA, 200 bp, synthetic construct
  source 1..200: mol_type = other DNA
agacaagagaaagcctacgtttcaatatgtgatgctcatgtgtgtttgtagtgtgagctcttgtttttgaaatgattgcttcagtctttgcctttgtttgcactgtgtgttcagtgaaaactagagaaacacaataagcaaatcacatgaaggctgagatgattgagatgaaagttaacatagtgtgaatgaaagtctgg

SEQ ID NO: 3745 - DNA, 200 bp, synthetic construct
  source 1..200: mol_type = other DNA
gccttttattgtttgttggaatcgatatgtacaaagtgtaaataaatgtttcttttcattatccttgcttgagcccatcaaaaatatgaattcaaagaactaaaatgatatgaaatggggtcataatttgaaagtaaggaaaacattaaagcatagcaaagagataaacaagaggtagcgtatgggtgaatggcagggtt

SEQ ID NO: 3746 - DNA, 200 bp, synthetic construct
  source 1..200: mol_type = other DNA
tagccatgcatttgatttgtttagttttgattgttttaacagttagtaatggtgctgggtaataagcataagaccaatctcttgctgttaaatcagttctgtccttggcaactttcttctgatatctgaatgttcatgaaggtcctagctttatattgtccctcttttaggaataaaattttgattttcaacaatgtgag

SEQ ID NO: 3747 - DNA, 200 bp, synthetic construct
  source 1..200: mol_type = other DNA
gcaaaggctccccttacagggctttgcttattaataaaataaatgaagtatacatgagaaataccaagaaattggcttttagtttatcagtgaataaaaaatattatactcttgaacttttgtctcatttttttgagtatgctgtttatatgattttgatttccctctgataactatcaacagtatttaaatagcttata

SEQ ID NO: 3748 - DNA, 200 bp, synthetic construct
  source 1..200: mol_type = other DNA
ccaactttgtacatcttggccatgtcactggtcattgtgtgaaataaagataatctggataatgactattagtccaatgctaagaaacatgatctttgctcattaaagagctaaaatgtttattgctgttttgtctttcttttttctaaaaaaagaaaaaaaagaaaaaaaggaaaagaagaacaaagaaacatgactgt

SEQ ID NO: 3749 - DNA, 200 bp, synthetic construct
  source 1..200: mol_type = other DNA
gatgtctgaactattaaatttaccattttgtttttcttgaatagtctgtgtacaggagtaaatatgttaagtggtttataaagaaattctgtttttagtcaagtgactttactaatcagttgttctaagtgtgaatatggcatgctaattagctaatttggtagaagctaatttgcttctaaaaatcaggtataaagttc

SEQ ID NO: 3750 - DNA, 200 bp, synthetic construct
  source 1..200: mol_type = other DNA
tgacatgaatggggccatattcttcctggggcccaaatgctggctggccttgtggtccaaataggcatcatcaataaaacagttggcatgcatcccactgctgactataatgcctctccttaaatgcttctagggaccagcaatacagtgctcgccacagtgggcagtcacacaaagctacccatctgccagatcaccaa

SEQ ID NO: 3751 - DNA, 200 bp, synthetic construct
  source 1..200: mol_type = other DNA
cgtgaatatatctggatggggggttttgtaaataatgaagttgtaataaaaataaaatgaccaaaagcacctttaaagtgaatatacaatttatttaacattcaaacttcattaagacatgtgcaatatggcaattttactggggattaaaccctacctaggattgcttgctggggcttagcaacagggtccagttcaca

SEQ ID NO: 3752 - DNA, 200 bp, synthetic construct
  source 1..200: mol_type = other DNA
cagatggtgctgatgaacatttgcaactcatcagcctttgtgcaactgtgatgcagcagttatctcagaattgttaacgtgaatatatctggatggggggttttgtaaataatgaagttgtaataaaaataaaatgaccaaaagcacctttaaagtgaatatacaatttatttaacattcaaacttcattaagacatgtg

SEQ ID NO: 3753 - DNA, 200 bp, synthetic construct
  source 1..200: mol_type = other DNA
aatttaccaaagagatattgatattgaaggaatttgggaggaggaaaagaaacctggggtgaatacttattttcagtgcatcattactgttccagattcctatgatggatggcagactctttaataaattgcttactgatattatcttatcattgagccaatgaaatttttttcccctgctagcatagatgtactgtggc

SEQ ID NO: 3754 - DNA, 200 bp, synthetic construct; identical to SEQ ID NO: 2850
  source 1..200: mol_type = other DNA

SEQ ID NO: 3755 - DNA, 200 bp, synthetic construct
  source 1..200: mol_type = other DNA
tgctgtacccctcaaggatttaaactaacgaaaaatcaataaataaatgtggatttgtgctcttgtatttttaagtggattaaaaaacttactaccttaaattgatttgctacatgcttaaaatgatagaggttgctcagcatttttggagtacaagggggtcagagagtcatgtgatgaaaattacagggcgagtacag

SEQ ID NO: 3756 - DNA, 200 bp, synthetic construct
  source 1..200: mol_type = other DNA
ctaacgaaaaatcaataaataaatgtggatttgtgctcttgtatttttaagtggattaaaaaacttactaccttaaattgatttgctacatgcttaaaatgatagaggttgctcagcatttttggagtacaagggggtcagagagtcatgtgatgaaaattacagggcgagtacagagatttagaagggaacgggtttta

SEQ ID NO: 3757 - DNA, 200 bp, synthetic construct
  source 1..200: mol_type = other DNA
gtgaccctgcgacccactctttggaccagcagcggatgaataaagcttcctgtgttgtgtgatactccggctcctcatttgctgtcgctggttgtggaattcctaggttgaagttctgtccacctcccagttcacgtgaggtggaagacagggagggggtttcaaaagaatccacattaccattcacagacccagaatgc

SEQ ID NO: 3758 - DNA, 200 bp, synthetic construct
  source 1..200: mol_type = other DNA
acccagccgggtcaataaacctggacgcttggaccctgcctgcgagtctgccggggcgggagggcgcgtcggtggctgctgggccttgcgcacggggagtcgctcggtggcaggctgggtgggggctcccgggccctctggggtcctctagcgaggcccccctcgccgtgcactccggagtcgccgtgctgggccccagg

SEQ ID NO: 3759 - DNA, 200 bp, synthetic construct
  source 1..200: mol_type = other DNA
gaccacgctgctccgtgtgaataaatgcccagtggcacgcctgtgtcctgtctctctgttctggccaccagagcccctgcgtcgcccccggcagtcctgggttgggcccctctctgggcttgggtttccccagctgttccagctgggcgagccctcttggctgctgtcccataccagtgcccgtgcggagaggtggacac

SEQ ID NO: 3760 - DNA, 200 bp, synthetic construct
  source 1..200: mol_type = other DNA
aaattactgaaaactgaatctttattacgtgtcctcttttatttattagaagactgtgtataataaacactactaaatttttaaaatttgaggtcaatggaacatttaatttgatgaattgaactattatattaatttgtcttttttctcatgtagtacattcagaataccagtgctttttatgacttgagcatgtgttt

SEQ ID NO: 3761 - DNA, 200 bp, synthetic construct
  source 1..200: mol_type = other DNA
caccccggtgcggaccacagagcagaccctggcgccaggaaggagcatgtgttagcgactcgtcccacctggaattgtaataaatacatctaaataaaacatgccttgggagtgtacagacctttctgcactaatacctgagttgtcttttcactaaagctggattgaagaaaaagccccaagagtacccctgaggcccc

SEQ ID NO: 3762 - DNA, 200 bp, synthetic construct
  source 1..200: mol_type = other DNA
gacagcatccaagggagtgggttttgtgcaagggctgggggtctcctgcctctcctggtgtcgccggtggctcattttctggcaaatggaggcacgaacgcaggggccaaatagcaataaatgggttttgttttttttttgcaataacttattgaagtcagcagggcatccttccctagtatgcttcctggggcgtgtct

SEQ ID NO: 3763 - DNA, 200 bp, synthetic construct
  source 1..200: mol_type = other DNA
cccggccccagcacccgccaggatgtggagtccgaggcccatctccgcatcccgggctcctggctcttgattttgtctgccacagacatcccacaaagccgctgccattttattaaagtgttttgatccactttgcactggaatgagaggatctgtgtaaggcactttccagggaaggctggggactgacccttgttgcc

SEQ ID NO: 3764 - DNA, 200 bp, synthetic construct
  source 1..200: mol_type = other DNA
ttttttcactgtactttctgtatcatgtaaaaactacacttaggatatgagaaaattttaaattatatgcatcacatcagaagaacatattattggcaaataataaaattatcaactgttttcaaactgtgcaaagtgttctatttagcagtctgccttgtgtctgctacttgaccctgaaattcaattgagtctaccca

SEQ ID NO: 3765 - DNA, 200 bp, synthetic construct; identical to SEQ ID NO: 2777
  source 1..200: mol_type = other DNA

SEQ ID NO: 3766 - DNA, 200 bp, synthetic construct
  source 1..200: mol_type = other DNA
ctagcttgccattattgtgtgtgtaattatggccaaaaggacataggagatggactaagatgtcttggaccacctttgtgtaacaaagaaataaacagtaaattttattttttcatattctgcttcatcttctcttagtgatatagtcactatgatagactttattttttctgagctttctctttaatgctatgtgcaga

SEQ ID NO: 3767 - DNA, 200 bp, synthetic construct
  source 1..200: mol_type = other DNA
tcttaaacactgaatatcacactcttcttatgactcttgttagcgattcaaggacataaatcttcattcttttctggcacagactacttaaatgggtctgttttcactttgctcatttttcttcaataaatctttttggcaagcaactgatttactgtgtgtaggtgtgtttgatattctactacagacttctcaaatta

SEQ ID NO: 3768 - DNA, 200 bp, synthetic construct; identical to SEQ ID NO: 2858
  source 1..200: mol_type = other DNA

SEQ ID NO: 3769 - DNA, 200 bp, synthetic construct
  source 1..200: mol_type = other DNA
aaataaaatatactagtcctgacactgaatttttcaagtatactaagagtaaagcaactcaagttataggaaaggaagcagataccttgcaaagcaactagtgggtgcttgagagtcactgggacactgtcagtgctagatttagcacagtattttgatctcgctaggtagaacactgctaataataatagctaataata

SEQ ID NO: 3770 - DNA, 200 bp, synthetic construct
  source 1..200: mol_type = other DNA
agctatctgatgagaattttcatatatgaattatttattgtacatgtgtgttattaaagataacttatactttataaatgaaaaaatacatttcagttatacattaagaactacgaataatgtttgaatatacctcttcccactaacaattcattctttggaatacttacacattatttctctgctaaacagactatagt

SEQ ID NO: 3771 - DNA, 200 bp, synthetic construct
  source 1..200: mol_type = other DNA
gtttatgccagttacatacaaggatcctgcatatctcaaggaccctaaagtttgtaacatcagatatcgggaataaattctatcacgttaccactaataaacttattttacagtaagtggttgtatgatgccaatactgactcaaaccaacctttggatagaaaagtgtttgaggagtgaggtaaagaatgacacttccc

SEQ ID NO: 3772 - DNA, 200 bp, synthetic construct; identical to SEQ ID NO: 2768
  source 1..200: mol_type = other DNA

SEQ ID NO: 3773 - DNA, 200 bp, synthetic construct
  source 1..200: mol_type = other DNA
taaaactcctttcagacatataagtttaataaataacttttttgttgactttcaagtaaagtgattttttttaatttaacataaagtcttcagaaagcctttctatgaaagaattttaacctataatgtaaaggatgtattctgagagaacaaagcagaatgaaacttgagtcacttactaaatatagtggatataaaat

SEQ ID NO: 3774 - DNA, 200 bp, synthetic construct
  source 1..200: mol_type = other DNA
aaaattcatcctgtataataattttacatatcatttcataaagtattttaatagaaaaatcacttgtatgcttatattttcagtaattattgtatggtgctcttgtcttctttgtttgtgacccatgcttgaaaacttgaaggaagttagatatgaatggcaaaagttaggcagtatttataaggtacctgttttatgtt

SEQ ID NO: 3775 - DNA, 200 bp, synthetic construct
  source 1..200: mol_type = other DNA
agagcagttttccaatgaaaactgtgtaaatagagcatcaacaagtacaaaattcttgtcttaattagtgggggtatataaaaattccttgtaatggtcaaatattttttaaaattgacattaataaagcatattttaaaagattctaaataaaagggtagcattattatagaaatactgctgcagatttgctttctgga

SEQ ID NO: 3776 - DNA, 200 bp, synthetic construct
  source 1..200: mol_type = other DNA
gttcagacttcaaatagtggcaaataaaaagtgctatttgtgatggtttgcttctgaacattctttttttaaaaataatctgacagcttggtggattagacagtaaatttgacagctggtaaacttttctgacccagacaaattggatataaacatactactatgcacctttactgtgaagctgaaatggggcggagaag

SEQ ID NO: 3777 - DNA, 200 bp, synthetic construct
  source 1..200: mol_type = other DNA
atcacagcggaaaataaaaagaaagtcgcgttgttatatttctaaaccaacctaacaagaattaagcagagttgggggaagtgggaggggtgacaagcattatagtgattcttgcacaaacagctttaatttttccctttttcatactttaacaattgaactgttaagggtggttttaatgtaaacatagtttctataat

SEQ ID NO: 3778 - DNA, 200 bp, synthetic construct
  source 1..200: mol_type = other DNA
aataattggatttttaaacaatgtgaataaagaggcttgtgttttgattactagtgtaaactggttattgagatagattatgacattggtggatattttggcacttttatatgaaaataaattttttaatgaaatctgggtgctctgttttttttaactcttcataaatcagtggtaaaaacaaagcatccatatgtcag

SEQ ID NO: 3779 - DNA, 200 bp, synthetic construct
  source 1..200: mol_type = other DNA
aaagcacctgtcaaatggctttgaagaagtgatgccaccatctctagccataataaagaaacagaatcacctagtattggatgtatttcaataataaatagagtggtgtcttttccataattgtgttaaagaacatttcttttccattcaatttgtttattaaactcctatgccaggcattgttgaaaatacaaaattaa

SEQ ID NO: 3780 - DNA, 200 bp, synthetic construct
  source 1..200: mol_type = other DNA
aaaggccatccacattttaaagggttatttgtcttttatataattcgtttgctttcagaaaatgttttagggtaaatgcataagactatgcaataatttttaatcattagtattaatggtgtattaaaagttgttgtactttgtctgtgaccttaattttctgcactgagttaccaaatatttccaaccaggtagtcttc

SEQ ID NO: 3781 - DNA, 200 bp, synthetic construct
  source 1..200: mol_type = other DNA
gagtctgctgggattgagcaatcatctcctgcccaagtttcctccttgccctgaggaccagtgaaagacagatcataggagagtcccttttgctgctacttcattcgttctgacctaataataaaagttagaaccatatgagttttcagatgtcgtttttgaatagtgttgaaaggttatgttttcacaaggtaagtcct

SEQ ID NO: 3782 - DNA, 200 bp, synthetic construct; identical to SEQ ID NO: 2775
  source 1..200: mol_type = other DNA

SEQ ID NO: 3783 - DNA, 200 bp, synthetic construct
  source 1..200: mol_type = other DNA
acacatttttataaaaatgagtgcttaaactaagttgtattccttttttctttctctttttttaagtgctgtggttaaaatttgaaagcatttagtgtggtatgccatttggcttagatacctctaaataagactcttcaaaacagagccctgagatggtcctttttgacccatctacttcatatgcttgtcacattaaa

SEQ ID NO: 3784 - DNA, 200 bp, synthetic construct; identical to SEQ ID NO: 2830
  source 1..200: mol_type = other DNA

SEQ ID NO: 3785 - DNA, 200 bp, synthetic construct
  source 1..200: mol_type = other DNA
ttgcactagactgcttgtaactaaccaagatgattgttgctgcttctaaatttttttcaaggacaacttgagtggagtcatttttgtaatttttaaataaacttaaatttgagatatgcattttttttctccaaaaagtctattagctcagattctggcttgatttgggatcttgttttattatcaaatttcagcattca

SEQ ID NO: 3786 - DNA, 200 bp, synthetic construct
  source 1..200: mol_type = other DNA
ttggcactgactatatctctgcttgactgtgaataaagtcagctgtgcagtatttatagtccatgtataataaatacatctcttaatctcctaataaattggacctttaaactacagatacattttgtggtgtctattttaaatgttttttgatgtctcaaattgagcatgtttcaatttcctatatagagagaagattt

SEQ ID NO: 3787 - DNA, 200 bp, synthetic construct
  source 1..200: mol_type = other DNA
atcgtatcggttcctgttcagatgacatggggaagatgatggttcagccactggtactacgagaatgtttgtattacccacatttgaaatgatttgctatgatttttatgaagattaaaaatatatacacagttcctggtatgttgaggttgtctttattattcttactcagaaaggaaaatttgtaaatatgtttgtgt

SEQ ID NO: 3788 - DNA, 200 bp, synthetic construct
  source 1..200: mol_type = other DNA
taaccgtttcctttcatttactgtggcttcttaatcttttcacaaataaaatcaatttgcatgactgtacctgtttctctcttgtaaccttagtgggcagatctgcaccagcaaagtgaagcagagttacatggcagccttgtagataatgcaaggattacgtgatcaatgtcaccagagtcatttgtgcgtcaagtgac

SEQ ID NO: 3789 - DNA, 200 bp, synthetic construct
  source 1..200: mol_type = other DNA
tgcattatggtcaaatcttttcatgtatatggatgtgactattttaacaaataaaagaagtgaaaagttatttaccttgtattttctgaatgtacaatagtttcctattctattaatcttgagttcatttttagtatgcacaagaaatgtgagattatgtactgtagaaacctaacttcttttagacttaaatccttcat

SEQ ID NO: 3790 - DNA, 200 bp, synthetic construct
  source 1..200: mol_type = other DNA
aaggtcatgctgttacaggtgtagtttgtgtgcataaataatacttccgaattaaattatttaatatttgactgatttcaataactgtgaaaaataaaaaaggtgttgtattgcttgtgagaacttgaactgtttactagttaattgaagaaaaagtgtaacactaaggtgaacttgcttcccttttcactaattttgct

SEQ ID NO: 3791 - DNA, 200 bp, synthetic construct
  source 1..200: mol_type = other DNA
gtaaaaggtcatgctgttacaggtgtagtttgtgtgcataaataatacttccgaattaaattatttaatatttgactgatttcaataactgtgaaaaataaaaaaggtgttgtattgcttgtgagaacttgaactgtttactagttaattgaagaaaaagtgtaacactaaggtgaacttgcttcccttttcactaattt

SEQ ID NO: 3792 - DNA, 200 bp, synthetic construct
  source 1..200: mol_type = other DNA
ctatggactctagttcagttttatatgcaatggatcactattttatttaattttttttaaataaaaaatacaatagcattggctatattctgactttcctgctacagcatcaacaagggtaaccaaccttccaggttagattccagccattagtgcttcagaccatggagaggggcaaagtgcccatggtccaggcactg

SEQ ID NO: 3793 - DNA, 200 bp, synthetic construct
  source 1..200: mol_type = other DNA
aaatggaggggaaaaaggccacagcaatctgtactacaatcaactttattttgaaatcatgtaaaataagatattagactgttttttgaataaaatatttttattgattgaacctttgaccctctatcttattacatttagaggcctggcatctttcttgtgagtcaagcttaaggacacaaaagaaacacaactttgtg

SEQ ID NO: 3794 - DNA, 200 bp, synthetic construct
  source 1..200: mol_type = other DNA
tagcccgacagttctgaactggaacatgggcattgggttctaaaggactaacataaaatctgtgaattaaaaaagctcaatgcattgtcttgtggaggatgaatagatgtgatcactgagtcagccacttggtttttggctctttcagagaggtctcaggttctttccatgcagactcctcagatctgaacacagtttag

SEQ ID NO: 3795 - DNA, 200 bp, synthetic construct
  source 1..200: mol_type = other DNA
gagcattttaagaggtgcagcctctggaagtggatcaaactagaactcatatgccatactagatatgtttgtcaataaacttatgacgtgaatgcttaatgcctcttttttgaaatagggaatgtaataattggccatttgcctactttattatttgggtaacattccagtattactctctgtgatttagcttatttaat

SEQ ID NO: 3796 - DNA, 200 bp, synthetic construct
  source 1..200: mol_type = other DNA
aataagtgtgtggtcccaagttggaaatattcatgcttcttccttaccctgcgattttgcctgtgtctgaagtggttgttttgtcatgaattcttatgcttataatatcctttgtggcaccttttctttttctccctaaactgtacatgtgaaggggatgagctcaagcaggaagttcaacttccagaattgatcatagg

SEQ ID NO: 3797 - DNA, 200 bp, synthetic construct
  source 1..200: mol_type = other DNA
tgtgaggacttctgcatcttacagtcagcacagaacacactgagtcttgaatcaagtcagcaacagagcaaaataaaggttagataagtccttgtgtagcaaatttcgagcataagaaataaaatctaattaattcttagggtactcatctgacttgaactctgttggtttactgtgttagtaaactgtgctttctatta

SEQ ID NO: 3798 - DNA, 200 bp, synthetic construct; identical to SEQ ID NO: 2743
  source 1..200: mol_type = other DNA

SEQ ID NO: 3799 - DNA, 200 bp, synthetic construct
  source 1..200: mol_type = other DNA
gagaagaaagagccatggagatagtagcagacaggctgcccaaggtatgaagcagatgagggaccagcactcagtctaacatgtaaacatcatacgtaataaaggttgtgtttcaaaccttacctggatatattatttaattaacaaattaatctacctatctattcatcattttctttttttttcctttttctttttct

SEQ ID NO: 3800 - DNA, 200 bp, synthetic construct
  source 1..200: mol_type = other DNA
caacgcatccggatgacggttccctgtctctgaaagacctttctctggaagaggagtctgcattgtagtgtctcaaagacacaataaacttcctatggtctgcactgttgtgatattacatttttgtgagtagaatcctgtgtgaccactaatattcaagttcatgaagcgcccctcctcagcatgagtcttgaagtttt

SEQ ID NO: 3801 - DNA, 200 bp, synthetic construct
  source 1..200: mol_type = other DNA
tgggcatggggcacccatgtgccgagagccttgcagaccatgacaggtccctattaaacacaggctttctgagttgtcctctccagagttgctgtgattatggcatttccccaccttttagagttgggcctggacaggtgctcatgaagtgtgattccccagagccaactccccgtcccccaccacaggacatgcagacc

SEQ ID NO: 3802 - DNA, 200 bp, synthetic construct; identical to SEQ ID NO: 2710
  source 1..200: mol_type = other DNA

SEQ ID NO: 3803 - DNA, 200 bp, synthetic construct; identical to SEQ ID NO: 2764
  source 1..200: mol_type = other DNA

SEQ ID NO: 3804 - DNA, 200 bp, synthetic construct
  source 1..200: mol_type = other DNA
gaaccaaggttttgaaatcccatcaggtcaccgcgaggcctgactggccttattgttgaataaatgtatctgaatatcccctgttgtttccatttgctttttcctcaaaggtatgtttgattataccagggtcaggggactttggtaagactgagaatagaccaagttttaaaaacatcaggaatcctgtaatttcagac

SEQ ID NO: 3805 - DNA, 200 bp, synthetic construct
  source 1..200: mol_type = other DNA
gatgctgatcctcccgctggcttccagacagacctgggacttggcagtcatgccgggtgatggtgttcctgcggagtccctcagttgtcctattccttcctagcttccctgcaataaaatcaagctgcttttgttggagatgttgtcttgcctggtcttggtgttgcttgctcacatgtaggtggttatgcttacttggg

SEQ ID NO: 3806 - DNA, 200 bp, synthetic construct
  source 1..200: mol_type = other DNA
tctccaccatcggaggcgtgacctatgagcgcgtgagcaagagtctggcctaagcagccaggcccggcccagggagctacaaacccaccaataaaactgatataaggacagacgctgctcgctccagaacctctttgtttttcttttctggtgtcttgggatggcctctggctgggtgagggtgggaaagcccccaaggg

SEQ ID NO: 3807 - DNA, 200 bp, synthetic construct
  source 1..200: mol_type = other DNA
cagccaggcccggcccagggagctacaaacccaccaataaaactgatataaggacagacgctgctcgctccagaacctctttgtttttcttttctggtgtcttgggatggcctctggctgggtgagggtgggaaagcccccaagggtggccacatgggcaacacattgcccctgagatccatgtgggattcatgtcatgg

SEQ ID NO: 3808 - DNA, 200 bp, synthetic construct
  source 1..200: mol_type = other DNA
tttcttagtgcttcagagtttgtgtgtatttgtattaataaagcattctttaacagattcttcctagtattgtggttgcttttccatggaggttacttaaaataacatgaaagctagctgaggtgtttaacaaagagtctataatgtgacaatagagatttgtctgatgtctaaaaacttaaatctttttggtttaacag

SEQ ID NO: 3809 - DNA, 200 bp, synthetic construct
  source 1..200: mol_type = other DNA
ccttcataggtttgaacactgtgtgtttttaccaaagtggccattggcactgtttgcttttttacaatcatgtggacacaagcataagtaaagaaaatttgtcaaccaggcaaaatgtggttctttaacagctagaattctaaaaagaaaaaaatcacttccacaaatatgcttatatcttgctgagcattaaaccaaaa

SEQ ID NO: 3810 - DNA, 200 bp, synthetic construct
  source 1..200: mol_type = other DNA
acccagctcaggctcgcctgccatctccccaaggctgcgttgtgtttgctattattttctgtgtgttttctttgtgagtgttttgttttgttgtttttctattaaactgcataaagaaacggcacctatctgtatggtgatgccaggctaggttttgctgcagtaacaatcaacccccaaatcccagtggcctaaaccgg

SEQ ID NO: 3811 - DNA, 200 bp, synthetic construct; identical to SEQ ID NO: 2732
  source 1..200: mol_type = other DNA

SEQ ID NO: 3812 - DNA, 200 bp, synthetic construct
  source 1..200: mol_type = other DNA
ccggccagccaggccgcccactggtagcgcgggccaaataaactgtgacctgggcgcggctggctcctcctccacttgcgcggtggggggagttgtaaataaggaaactggtctttgcaagacggttacctggtggagccgggattttgagtctagaggctgccaggcccctgtgccctacaccctgctctcccatggac

SEQ ID NO: 3813 - DNA, 200 bp, synthetic construct
  source 1..200: mol_type = other DNA
accaaggcccccgggccgacggagccgggaaagaagagccggagcctccagctgccccggggaggggcgctcgcttccgcatcctagtctctatcattaaagttctagtgaccgagtcccgggctgcgttctctgggtccgcgggggtggcgcaccgcgggctacggagcctggaggggcccagcccgagtccgggcagc

SEQ ID NO: 3814 - DNA, 200 bp, synthetic construct
  source 1..200: mol_type = other DNA
tctgggactggcaggttattaatcgagatacacttgttaggagggacagggttcccctaaggcacttttaaagatactctgtaagaaccattaacaataaacttactgtcaatcatttctctctatgcaaacgtcattggttaaagtgctgatgccatttaattagattgtttacaaatttaacaggatggctacaaaga

SEQ ID NO: 3815 - DNA, 200 bp, synthetic construct
  source 1..200: mol_type = other DNA
gccgagtctggagcatctacacctgaggacaagacgctgcccacccgcgagggctgaaaaccccgccgcggggaggaccgtccatccccttcccccggcccctctcaataaacgtggttaagagcagctcgagcctggtattttctcatccaaatgctgatccctgtgggggaccgagagtgccaagtcccagattttgt

SEQ ID NO: 3816 - DNA, 200 bp, synthetic construct
  source 1..200: mol_type = other DNA
aagtttatggcagagctttacaaataaaaaaaaaactggcttttctgacttttaggtttttttttcttatatgcaaaaaagctccattctatctacattgcttacacattaagtttgcactagcgaactggatgcaaggtatggactaagtaaacaaggctttgaaggggagctgtccgtctaagttctcaggattgggg

SEQ ID NO: 3817 - DNA, 200 bp, synthetic construct
  source 1..200: mol_type = other DNA
ccattggcacacgctagaagtttatggcagagctttacaaataaaaaaaaaactggcttttctgacttttaggtttttttttcttatatgcaaaaaagctccattctatctacattgcttacacattaagtttgcactagcgaactggatgcaaggtatggactaagtaaacaaggctttgaaggggagctgtccgtcta

SEQ ID NO: 3818 - DNA, 200 bp, synthetic construct
  source 1..200: mol_type = other DNA
actctgtttgctggctacacggacaacctggtgcgagtgtggcaggtgaccattggcacacgctagaagtttatggcagagctttacaaataaaaaaaaaactggcttttctgacttttaggtttttttttcttatatgcaaaaaagctccattctatctacattgcttacacattaagtttgcactagcgaactggatg

SEQ ID NO: 3819 - DNA, 200 bp, synthetic construct
  source 1..200: mol_type = other DNA
ggacagggcagtcttggtgtgcagcccctctcctctctgtcccctgacactccacagtgtgcctgcaacccaagtggccttatccgtgcagtggtggcagttcagaaataaagggcccatttgtgggatgccgcattcactccgtgtgtttgtgtgtctgcacgggagatgtttcctaggatctgaaattgctgctctgg

SEQ ID NO: 3820 - DNA, 200 bp, synthetic construct
  source 1..200: mol_type = other DNA
tgagtggcagaagtgagaatttgtaaacttatgtacaatgtacgtgtaaataaatggattgaatttcagtttgtcatcaggccgcgctcccgttttgtttttaaggggttaatcttttgagcttccttctcagcagtgtgtgggccaaaaggctcatactgacccacctggtgaaggagaggcaaagtgggcagtatata

SEQ ID NO: 3821 - DNA, 200 bp, synthetic construct
  source 1..200: mol_type = other DNA
gtcaccacttcactcaggctgcagccctcttggggctccaggatttgctgaaagagaaaaagatatggtttgtgaactggggcatcaatcatcttttgataaatggatcagttttaggactttcagaaaataaaagatcgctcttgaaaagctgttgacatagcatttgtcttttatttggggaaaggaggaaggtcttt

SEQ ID NO: 3822 - DNA, 200 bp, synthetic construct
  source 1..200: mol_type = other DNA
ggtctatatttacgtgcctaacagtagctctgggattttatcgcctgtggatctaataaagtgtctatttaaagtgatttctactgttttgccttaagaataccagattgttggctgggtgcggtggctcacacctgtaattccagcactttgggaggctgaggcaggtggattacctgaggtcaggagttcgagtccag

SEQ ID NO: 3823 - DNA, 200 bp, synthetic construct; identical to SEQ ID NO: 2713
  source 1..200: mol_type = other DNA

SEQ ID NO: 3824 - DNA, 200 bp, synthetic construct
  source 1..200: mol_type = other DNA
gagaaggacgtaaacagaacctgacaccagctccttttccttctatacattatttaatacctattaaataaaattatttttggaataaagcttgtgggaacatttgggatctagagaaagtgatatgtgaaattctatctcatatagtcagttaaactttattatttacaagttaaattacacagcagctttacacagca

SEQ ID NO: 3825 - DNA, 200 bp, synthetic construct
  source 1..200: mol_type = other DNA
agcgcgggacttggacacggacctcggcgggcgggactgggcggggcggggcatcagaactcaggtgttttttatttacgcgtcagggcttttcttgtttaataaagttatgatagctagcagtgcggtcccgggcgcctccccgtggggtttgccttcgcggcggactcgctcctctggtctacagcctttggaccggt

SEQ ID NO: 3826 - DNA, 200 bp, synthetic construct; identical to SEQ ID NO: 2819
  source 1..200: mol_type = other DNA

SEQ ID NO: 3827 - DNA, 200 bp, synthetic construct
  source 1..200: mol_type = other DNA
agtccttccagtgtcctccccagcctcctgagtctccggtgggctgccatgccctctttgtttccttatctccctcagacgcagagtttttagtttctctagaaattttgtttcatattaggaataaagtttattttgaagaaagatattgtttctttagtctcaaaacaagagtctaggaaagatccaaaacacagagc

SEQ ID NO: 3828 - DNA, 200 bp, synthetic construct
  source 1..200: mol_type = other DNA
gggtttcctgctggacaggggcgtgggattgaattaaaacagctgcgacaacacctgtgttccagatccttttggggcaagggagtggggaacaggcactggccatgttgttacactgagatcaaacctgacagccgtttttaaaggtttaaccccaatcccaagtgctgaaaaaccagaggctgagggagatgtgtaag

SEQ ID NO: 3829 - DNA, 200 bp, synthetic construct
  source 1..200: mol_type = other DNA
taatgctttagagggaggcagtcatatctctgtgtgcagataataaaagcatatttctaagaggttctctcgctgtcttcttagctgagtcatccctgtccagcaactcaagcacacaacagtgctttgctgttttatcatcatgtttttacatggggcattcactgggtgtagaggctggccgcaaatacgatgtcccg

SEQ ID NO: 3830 - DNA, 200 bp, synthetic construct
  source 1..200: mol_type = other DNA
ccttccccagacttctctttcttattttgtaataaactctctagggccaaaacctggtatggtcattgggaaatgagtgctcagggagatggagcttaggggaggtgggtgcttccctcctagatgtcagcatacactctttcttcttttgtcccaggtctaaaacatctttcctagagaaaacaaaagggactaaacta

SEQ ID NO: 3831 - DNA, 200 bp, synthetic construct
  source 1..200: mol_type = other DNA
cccatggtggggggaggggaggggaggggagggaatgaggcagctctaggatctatactgtagctaataaaatgtaaaaacacctggctctgtttcctgaccaggcacttctgtcatatccccacagccccttccaccttaacacacaccacctgtattaccccctcaggttcaaactcttgcacttggaatctctttgt

SEQ ID NO: 3832 - DNA, 200 bp, synthetic construct; identical to SEQ ID NO: 2813
  source 1..200: mol_type = other DNA

SEQ ID NO: 3833 - DNA, 200 bp, synthetic construct; identical to SEQ ID NO: 2838
  source 1..200: mol_type = other DNA

SEQ ID NO: 3834 - DNA, 200 bp, synthetic construct
  source 1..200: mol_type = other DNA
ctctatcacagtcctgccatgatgagccctgttcctgctcatcatgaagatccccgcgatacttcaacgccttctgacttccaggtgatgactgggcccccaataaatcccgtctttgggtctctctgccttttgcctgttttttgtcatgtatgcaaatttgttgggagaatataagtgcttctagtccctgtattctc

SEQ ID NO: 3835 - DNA, 200 bp, synthetic construct
  source 1..200: mol_type = other DNA
gctcaggccttacctcgtgcacatacctaggtgtggagtcttgtacattgccatcgtcaataaaactgccccagtttccccttgaccttacggtttgggaatctcctctagctttcccagaaaggaagcccttgctgctctaaagaaagtttcagcctgagaagggatggtgattgagctatctgctgtgactgctgctc

SEQ ID NO: 3836 - DNA, 200 bp, synthetic construct; identical to SEQ ID NO: 2744
  source 1..200: mol_type = other DNA

SEQ ID NO: 3837 - DNA, 200 bp, synthetic construct
  source 1..200: mol_type = other DNA
gggagtggggaggtggtaagaacacctgacaacttctgaatattggacattttaaacacttacaaataaatccaagactgtcatatttagctggatagttttgggcatcatgaaagtctcattttcttccacaggggtaagaaaatgaatttggatgagaaaaagacaagagattttgctccttgaggcccaggaccata

SEQ ID NO: 3838 - DNA, 200 bp, synthetic construct
  source 1..200: mol_type = other DNA
acttgctgcctcgacacgtgggctcccctcttcctcttgaccctgcaccctcctagggcattgtatctgtctttccactctggattcagccttctttttctggactctggactttctctaataataaatagttcttctttatgttggtcatcctgttgtttttggaagggagttttccctgagtggctacaaggtttcct

SEQ ID NO: 3839 - DNA, 200 bp, synthetic construct
  source 1..200: mol_type = other DNA
ccctagacttggggtcaggggaaggtagagctggagcttttacagaaataaaacccaagagtttgattatatgacgtgtgtgtttggcgactgctagagatttgagtggggaggtgggagggttttccttgctggtggagaaggagcccttggcactgaggctgtcgcatgatatgccaagggtcttgttagggtgagga

SEQ ID NO: 3840 - DNA, 200 bp, synthetic construct
  source 1..200: mol_type = other DNA
ggggcagatgcaggaaacacctagagcagccccagagtcacggggctgagggggcgggagctgcccctgtcatagggagggggattcccagcgtctgtagtgcttcctgtttgctgaataaaggtctctttctcacacacatctctgggagcaggctgacagcttcaccaggggccagccaagttgccactgccctggcc

SEQ ID NO: 3841 - DNA, 200 bp, synthetic construct
  source 1..200: mol_type = other DNA
cttcagtcatcccagcaatcgcttggttcagtttcattcagctctctatggaccagtaatctgataaataaccgagctcttctttggggatcaatatttattgacttgtagtaactgccaccaataaagcagtctttaccatgctttgtctgattttatcactttatgccaataatttcaacttttggtcagccttgtaa

SEQ ID NO: 3842 - DNA, 200 bp, synthetic construct
  source 1..200: mol_type = other DNA
ctgattagctacttttgattatatccaaagcttgtggggtttaaatttagtgtacaaatgtatcataattattttaaactaatttatttgtatataaattattaataaaatgaaatattttgtaattattctggtatttggccttttctttatccctacactagaattgaatgttggaatctaaaacaggtgccatctac

SEQ ID NO: 3843 - DNA, 200 bp, synthetic construct
  source 1..200: mol_type = other DNA
agtcttcagttgaaattccactacaaaagacatcattccagactaaataaatttactcaaaaaccatgtattgattccccagccttgtgcagggtactattgggctataagaattttcatggaaaaccaaaatattaaaaagcacattccagattatattgagccaagtctgagaagaaaaaatagtgagaggtagcaaa

SEQ ID NO: 3844 - DNA, 200 bp, synthetic construct
  source 1..200: mol_type = other DNA
aacattccgaagaattccatagtggaccacttggaaataaaccattggacagatttcagtaatgtcttcagtggaacacaaatgaaaatgaatagcttgtttctgtcaagcatattggaaagtgattttatttttgcaaaataagtttttctttaatatgattctagtacataattgattaaaatctcttgattataaat

SEQ ID NO: 3845 - DNA, 200 bp, synthetic construct
  source 1..200: mol_type = other DNA
tgaaggagagcagggtccaaatggaagtcagaactctagctacagccaatcttaaaacattccgaagaattccatagtggaccacttggaaataaaccattggacagatttcagtaatgtcttcagtggaacacaaatgaaaatgaatagcttgtttctgtcaagcatattggaaagtgattttatttttgcaaaataag

SEQ ID NO: 3846 - DNA, 200 bp, synthetic construct
  source 1..200: mol_type = other DNA
ataaaaatgcagtttagtgattgttgacgttcttatttggtgagtgcctgtgagcccaaatttttttctagccatccctttcaaacatttttccagattagattatacattccatgatacaagctttaaaaaataaacacaccattttggccagtaattgatataaaaatatcagcacttggatttgtctgtagtcagta

SEQ ID NO: 3847 - DNA, 200 bp, synthetic construct
  source 1..200: mol_type = other DNA
tggattgctttttagcaatagagctgctttctagtggtaaaggaaggggtcacctgaaaaataggacatttttattaaaataaagttctcttagcgtttgtggaatctgccgagccattttgtggaaattgggatccatatctggagtcacttcccaaggcctgcctcacctccaccccctgcccaccttgatccatgct

SEQ ID NO: 3848 - DNA, 200 bp, synthetic construct; identical to SEQ ID NO: 2821
  source 1..200: mol_type = other DNA

SEQ ID NO: 3849 - DNA, 200 bp, synthetic construct; identical to SEQ ID NO: 2724
  source 1..200: mol_type = other DNA

SEQ ID NO: 3850 - DNA, 200 bp, synthetic construct
  source 1..200: mol_type = other DNA
accattaagtcttttgtcaaggtctgactaggtcaagggtaatggaccagtatcatctggtgatctggtaaacaaataaaagtggtggcacctttagatgatgacaacagttgagctctttacttttagtaagaccgacagaaatgtagtcagtaaagcacatgtagtgataggctatcagttatgtctgatacataaga

SEQ ID NO: 3851 - DNA, 200 bp, synthetic construct; identical to SEQ ID NO: 2778
  source 1..200: mol_type = other DNA

SEQ ID NO: 3852 - DNA, 200 bp, synthetic construct; identical to SEQ ID NO: 2714
  source 1..200: mol_type = other DNA

SEQ ID NO: 3853 - DNA, 200 bp, synthetic construct
  source 1..200: mol_type = other DNA
tgcccaagttttggaaatattctgttttaaaaagcaagagaaattcacaaactgcagctttctaaaaaacaactccaaagtgaagtctgtttattttgctgtttcccctccatgcctgtgaattggatgttgtggtccctgtagagtgagtgcatgtggcgtacacggggagaaaggagctctcccacgcctgagtggct

SEQ ID NO: 3854 - DNA, 200 bp, synthetic construct; identical to SEQ ID NO: 2844
  source 1..200: mol_type = other DNA

SEQ ID NO: 3855 - DNA, 200 bp, synthetic construct
  source 1..200: mol_type = other DNA
tagaggtgctgtttccttttgggatgggcccgtgcctggtaggccaggctgttctgggttcctcccagctccaagcctggccctgtctccaggaggcacctgcactggttgagttctctgggccccgtgttcaggcactgtctctgtcttctgatgaagcagctgtgtcctccagtccctgatgctgacgtccccagacc

SEQ ID NO: 3856 - DNA, 200 bp, synthetic construct
  source 1..200: mol_type = other DNA
ttgccgtaactgattttaaagggtttagattttaagaatggtgctctttcatgcctattatcagtaaggggacttgtattagagtcagagtctttttatttaggccagttgtcaagtgtcaataaaagcatcatgtaatttatggttttcattttatttaaaattcagcaaaatcatacgccatctaccgtgatgactgc

SEQ ID NO: 3857 - DNA, 200 bp, synthetic construct
  source 1..200: mol_type = other DNA
atgttaccaccttaagagaacccttcaagtgtggagctttctagtaggtgtccttcatagctcagaaacatacctcagaacaagccattcatgacttacctgtaatgggaaaataaatcattctatcagatcagcagttttgatgtttgagtgattttgatatgcttcacagagtcaaatgctgccaaaataaacatcga

SEQ ID NO: 3858 - DNA, 200 bp, synthetic construct
  source 1..200: mol_type = other DNA
gagatgggacatcattcagtcactagttggatggcacaaggctcttcacagacgcatctgtagcagagtggaacttgtactaacttatgatagaatgtatcagaataaatgtttttaacagtgttatgcttgagtcttttttgaattgaacatgctaggattatcaggtaaaaattaagccttttggtactttctcaaaa

SEQ ID NO: 3859 - DNA, 200 bp, synthetic construct
  source 1..200: mol_type = other DNA
cattgatatgaaccatggacaagtatattctgctgccacaaagactgtaaagtgcttcatttcaacagctgaggcaagccaagtgatcattaataaagcttttcttggttccttcagtggtgttggtagtaaaatggtaggtaaaagttaggctgcaagttcaataaatcatgagatttcccatcgttacacccttgtgt

SEQ ID NO: 3860 - DNA, 200 bp, synthetic construct; identical to SEQ ID NO: 2831
  source 1..200: mol_type = other DNA

SEQ ID NO: 3861 - DNA, 200 bp, synthetic construct
  source 1..200: mol_type = other DNA
ggggtgggcttgggcaataaaggcacctcccccaacagcctggagtccagcgcagccgtgcatgccaggctcacaccgccatcagctgtggggactccagaaccaggggtgcagccacccaccctcccccactccatacgtgtgtcaccaggggcaggagcctagtacccacacctagtcatcaggacactgagccaggg

SEQ ID NO: 3862 - DNA, 200 bp, synthetic construct
  source 1..200: mol_type = other DNA
ggggcagggccaggcccacgggggggcacctcaataaactctgttgcaaaattggaattgctgtggtgtcttgtctgtgacagatgggttggggaccagccaagggggatcccagggtctcagtgcgcacatcaccatgatcatggccaccatctacctcctgggagctggcccctcgccagctcaccttgattcactcc

SEQ ID NO: 3863 - DNA, 200 bp, synthetic construct
  source 1..200: mol_type = other DNA
cgctgccctgcacctccgcagacctgctgtgatgacttgccattaaaagcattgtccaaaatcccctgttgtgtggactttgagcacactttacacaagaatctagaaaatcagatcgcgattaagagtcagagaatcttggattaaccgcatgggagatgttcttccttttgaagtttcattggagcattttcaatgat

SEQ ID NO: 3864 - DNA, 200 bp, synthetic construct
  source 1..200: mol_type = other DNA
tgtatccccatctgcctctcctggtctggcctagcctatggtctcactccctcttccctaatgggctggagagatgttgtgtgagtgatgtgcatgtgtgtgcctgcatgtgagcccaggactgcctctgggaaggaaatcactttccgtcagcatcttctatgggccagatatcaaacatctcagacaatttactcata

SEQ ID NO: 3865 - DNA, 200 bp, synthetic construct
  source 1..200: mol_type = other DNA
gccttagcccggatgcccacccctgctgccgccactggctgtgcctcccccgccacctgtgtgttcttttgatacatttatcttctgtttttctcaaataaagttcaaagcaaccacctgtcactggcccaggccctggtgtttgtggaaggaagcctcaggcacctgccatttgctggctttcaggagtcatctttgct

SEQ ID NO: 3866 - DNA, 200 bp, synthetic construct
  source 1..200: mol_type = other DNA
attactgtttacacacatttttgttcaatattgatatattttatcaccaacatttcaagtttgtatttgttaataaaatgattattcaaggatcttgatgtttctctttgtatatatgtgatgagtttgaaatatttgtatttccttgcagattttattcaaagcaaaaaaactttttaaaatgaatctctagcactttc

SEQ ID NO: 3867 - DNA, 200 bp, synthetic construct
  source 1..200: mol_type = other DNA
atactatagagtctttttgaaataaagtcagcttataattttttagctgaatatatctttatacatatgtaaagccaatattttagaataagtattttagtataaatattttagtaaaatactataaaaataaaaggacatataatttatttttatggaaaacatcaacatgtaatatcagaagagttgtcatcagtttc

SEQ ID NO: 3868 - DNA, 200 bp, synthetic construct
  source 1..200: mol_type = other DNA
gtggtctttatgctgtaatgtgaaagcaaatatttcttcgtgttggatggggactgtgggtagataggggaacaatgagagtcaactcaggctaacttgggtgtgaaaaaaataaaagtcctaaatctaaaccattgctgtagtcatttatgttcatgcagtctcttcataagaggtaactagaactgttttgctgtatc

SEQ ID NO: 3869 - DNA, 200 bp, synthetic construct
  source 1..200: mol_type = other DNA
agaggacacactctgcacccccccaccccacgaccttggcccgagcccctccgtgaggaacacaatctcaatcgttgctgaatcctttcatatcctaataggaattaacctccaaataaaacatgactggtacgtgtgctgattgcctgcctgtctgccgtagccattatcccatgttccaggggctcctgtggcacaag

SEQ ID NO: 3870 - DNA, 200 bp, synthetic construct
  source 1..200: mol_type = other DNA
gttattctaaggatttctactttggtcttcaagaaagctgtgccccagaacaccagagatttcaacttagtcaataaaaccttgaaataaagatgggcttaatctaatgtactgcatgagtagttggtgattttgtacattcattgagctctcccagagtctgtgtagagtgttgtgcattatgtagtataaaggaggtg

SEQ ID NO: 3871 - DNA, 200 bp, synthetic construct; identical to SEQ ID NO: 2798
  source 1..200: mol_type = other DNA

SEQ ID NO: 3872 - DNA, 200 bp, synthetic construct
  source 1..200: mol_type = other DNA
ggggaaccccagacccttagagagtcctgacctcactcttacctggggtcccatatcagccccttcattccatgtattccagttgtaaaacaagtatcaaaatattgggaaataaatatcagatagttctgagtcagtatggagtgtgtttgtggacggcgggaggggatgagaggagtttgggtgggtcagggagagtc

SEQ ID NO: 3873 - DNA, 200 bp, synthetic construct
  source 1..200: mol_type = other DNA
acgcaggccagccccggcccctagccctcaggccttctttcttatccaaataaatgtttcttaatgaggaatgggtcagatctccatgcttatggtattggggtccatcttgaggatttcttttcattaattaattaactcaacacatatttactatacagaataatcgtttaagaatgtggccaggggtggctgctcac

SEQ ID NO: 3874 - DNA, 200 bp, synthetic construct
  source 1..200: mol_type = other DNA
ccgtcccccgttcctcagtcctgtatcatccatacttgtactaccttgtcctatgaagctctgagaattttttgtacgatcagccttactgctaataaaagcacttccacagggctcctgactctcgtgtgttacataactcctccatccttccagagtaactcctgaggtgttgctcagccctgccacttttattattg

SEQ ID NO: 3875 - DNA, 200 bp, synthetic construct
  source 1..200: mol_type = other DNA
gggatcacaagtctccccgacattcaggggcagcaaacactgttgtggggtgtgacagggagctcttgcagccagaggctgcaggaaaaaggcttcccttgtcctacggttggggacaaagcaagaataaataatgctaatgaggtctgagtttgtgcggtaaatgctccagcgagggagaaaacgaaacattcctatct

SEQ ID NO: 3876 - DNA, 200 bp, synthetic construct
  source 1..200: mol_type = other DNA
ccgcggcgccgcccgggtgggacacgccaagctcttcagtgaagacacgatgttattaaaagcctgttttagggactgcacccggctctcctgtcgtcctttctcccacggggaaggcggggactgcggggcagccactctcagagtcccccgtccatcagggacccccgtccagcccagtgtggcctgacacctgccag

SEQ ID NO: 3877 - DNA, 200 bp, synthetic construct
  source 1..200: mol_type = other DNA
ctcacaccatcgcaaaggaccagggacacagctaactaacttattcagctttgggccgatgggggtgggggggggtctttcagtgaatatttttattaaactctactgtggacaagaagcctgtggaaaggtgtttcgagttatgcaggaagaagtgttcctgctttgactgacaggcaggcccaggagttgaggcttct

SEQ ID NO: 3878 - DNA, 200 bp, synthetic construct
  source 1..200: mol_type = other DNA
caatctttgttgtgtgtgcatttttataataaaactgaaaatactgtaaacattttcattcttaaaattatactcatggtaataatttgaaagtatgctgcttccaacataatttctcagagaacaaagactgaccattaatacaaaacaaccttcagaggggtagtctttttatcctttgaaagtatgatacagtattt

SEQ ID NO: 3879 - DNA, 200 bp, synthetic construct
  source 1..200: mol_type = other DNA
gcagtaccttgtccacagattagaaaacgtacacaagtgtttgcttcctggctccctgtgcatttttgtcttagttcagactcatatatggatttcaaatctttgtaataaaaattatttgtatttttaagtttttattagcttaaagaaataatttgcaatatttgtacatgtacacaaatcctgaggttcttaatttt

SEQ ID NO: 3880 - DNA, 200 bp, synthetic construct
  source 1..200: mol_type = other DNA
aatgtcattggtatatggtggctgtttaccaataaaaggaaaaaattcattaaccggttgcttccaaaattagaagttttaagttgcatgaaaccattaatagccttgaaagctttgataagttttcagtaataataacctatttaatcagatgatgatgtgtttgaaaatagtgttcaatatcagcaaatttgtacaca

SEQ ID NO: 3881 - DNA, 200 bp, synthetic construct
  source 1..200: mol_type = other DNA
cagaggagaataaaaaatggctgaggtgaacaaggtaaaacaactacattttaaaaactgacttaatgctcttcaaaataaaacatcacctatttaatgtttttaatcacattttgtatggagttaaataaagtacagtgcttttgtatatattttggtgtacttgttactttcactgattgttgatgaatccctttttt

SEQ ID NO: 3882 - DNA, 200 bp, synthetic construct
  source 1..200: mol_type = other DNA
tatcacacagctttgcagaaggaaggaagaccttgatcgacattgttttttatttttttaaccttgtccttgtaattacattcattgtttgttttggccaaataaaaatgcttgtatttctttaaaaagtaagcctgaatgtagagtaaaaggggaaatgccaagattttggggtttttttgtttcctttttttgtttgt

SEQ ID NO: 3883 - DNA, 200 bp, synthetic construct
  source 1..200: mol_type = other DNA
agcacgactgagggcaggaggctccatccttctccccaaggtctgtggctcctcccgaaacccaagttatgcatccccatccccatgccctcatcccgacctcttagaaaataaatacaagtttgaacaggcttcgctgcctctcgtgttggctaccacccctatgggctcagcactgacaaggggacgagaggctgctt

SEQ ID NO: 3884 - DNA, 200 bp, synthetic construct
  source 1..200: mol_type = other DNA
agccaggtgagaatttcaaggattatcgacttcatattgcacattaaagttacaaattaaagtggcttggtcaagaatgagaatggagttgtggatcttttttttgggggggggtggggtggtggagaggtggtgggaggggggcgggggacaaatctcactctgtcacccaggcttgagttccgtggtgtgatctcggc

SEQ ID NO: 3885 - DNA, 200 bp, synthetic construct
  source 1..200: mol_type = other DNA
cttggttaccaaagatgccacagcacagaaatatcgaccaacacctccctggtcacatccatggaatcagagcaagatttcctttctgcttctgttccaaaaataaaagctggcacttggcttccgcttgtctcttaatgacttgttcctgctatgttctatgcctggaagtcattaactgtacgggagaaaaataccct

SEQ ID NO: 3886 - DNA, 200 bp, synthetic construct; identical to SEQ ID NO: 2832
  source 1..200: mol_type = other DNA

SEQ ID NO: 3887 - DNA, 200 bp, synthetic construct
  source 1..200: mol_type = other DNA
agatgcgtggtgcctccaggaccgctgcgggtggtaaccagtggaagaccccagcccccagggagaggaacccgttctatccccagccatgataataaagctgctctcccagctgcctctcagctccttgtgttgcacgacttcctccttagcgtagctcagaggcggccagagagggcagggggacaggacccttcctc

SEQ ID NO: 3888 - DNA, 200 bp, synthetic construct
  source 1..200: mol_type = other DNA
atcctggacatgcctagcctgcacgtagcttttccgtcttcaccccaaataaagtcctaatgcatcagcctcagctgtttctcttacagggcagagtctagccaagccaaggtcagcccaacttaggcattggaagtcttctgccagccatcatccagctggacgtggcttctgaaatgtggagctgggcccttgaaccc

SEQ ID NO: 3889 - DNA, 200 bp, synthetic construct
  source 1..200: mol_type = other DNA
ggggttgatgtggggttcaggatggcccccccatggggggtggatgatttgcactttggttccctgtgttttgatttctcattaaagttcctttccttccccgttgtgaatctcagttttgggacggggagcagagctgagtcccccgcctcttccattcatgccccgccccccatacaaagacaaaaggccacagatag

SEQ ID NO: 3890 - DNA, 200 bp, synthetic construct
  source 1..200: mol_type = other DNA
ccgcctgggggccctaacctcattacctttcctttgtctgcctcagccccaggaagggcaaggcaagatggtggacagatagagaattgttgctgtattttttaaatatgaaaatgttattaaacatgtcttctgccaaactgtttttaggtctagggaaaattgagtaaggagaagaatccaagggaagggaatgggga

SEQ ID NO: 3891 - DNA, 200 bp, synthetic construct
  source 1..200: mol_type = other DNA
gagcccaaaaataagcagcacgacggaactttcagccgtgtcccgggccccagcattttgccccgggctccagcatcactcctctgccaccttggggtgtggggctggattaaaagtcattcatctgacagcagccgtgtggtcattggaaactggggaggggagggggagagaaggggaagggaagaaggtggggaggc

SEQ ID NO: 3892 - DNA, 200 bp, synthetic construct
  source 1..200: mol_type = other DNA
aggaaaacaaatcactttcattaataaagggttaaaagtctcctagtcattcaacatagtgtcacaagagtgtaagtttggaacatcgtggaattacgtgaaatgcaattaaaaaaatatgaccagacgtgagtgcctttattttcccttcaatgaaaattcttgatactttgttactcatctgctactgaatctctgag

SEQ ID NO: 3893 - DNA, 200 bp, synthetic construct
  source 1..200: mol_type = other DNA
gctgggagtgaccagaagaaatgacgcagaagtgaaatgaactttttataagcattcttttaataaaggaaaattgcttttgaagtatacctcctttgggccaaaatgaatcttgtgtctcaattggaagaggtaaagaagtagggggttagggtgcatgggttggaacgtgagtcaggtcgaaccacaaagcctgcctg

SEQ ID NO: 3894 - DNA, 200 bp, synthetic construct
  source 1..200: mol_type = other DNA
atgtcttcagaggctcatctaactctgtccttacatactcaatgcatatatgaaaacaatactaaataaacatctgatctgtataaaaatgtaaattagtttgacactgcttttttgataggtgtggtcatttctccccatggtagtttaaaacatcagaaactgaattctggacagatttaagccttgacacactgtgt

SEQ ID NO: 3895 - DNA, 200 bp, synthetic construct
  source 1..200: mol_type = other DNA
acctaaataaacacatagattcacctgtaaaactttattttatataataaagtattccaccttaaattaaacaatttattttattttagcagttctgcaaatagaaaacaggaaaaaaacttttataaattaaatatatgtatgtaaaaatgtgttatgtgccatatgtagcaattttttacagtatttcaaaacgagaa

SEQ ID NO: 3896 - DNA, 200 bp, synthetic construct
  source 1..200: mol_type = other DNA
gcctgtatcctccctggcagacacaacccaataggagtcttaatttatttcttaacctttgctatgtaagggtctttggtgtttttaaatgattgtttcttcttcatgcttttgcttgcaatgtagtcaataaaacctcatgtactattattggatgatgatgatcttattttcttagcaagtatgtttagtttaaattt

SEQ ID NO: 3897 - DNA, 200 bp, synthetic construct; identical to SEQ ID NO: 2805
  source 1..200: mol_type = other DNA

SEQ ID NO: 3898 - DNA, 200 bp, synthetic construct
  source 1..200: mol_type = other DNA
attctatcgtgatgcagagaagaaagaacggagtgaagccatttatgcctacggcagcagaaagagatgaaatcttgagagcagtgggaaatatgccctattgaatgtttgcattaaaagtgtttatataacttagaagcagatgaatatttctaataaatgattgctgtaatatttaagactgtacacccctcacccag

SEQ ID NO: 3899 - DNA, 200 bp, synthetic construct
  source 1..200: mol_type = other DNA
tttcagattaaagaaagctttgttttattttgctttcagagaatggtatgttttcttaactataggttattttatagagaatataaaagtataaaacattaaaaataaccctagatatactttaaaataatgttatatttatgctaaaatatgtaaattacactatacaaccatatgataggttatttctctaaccttgt

SEQ ID NO: 3900 - DNA, 200 bp, synthetic construct; identical to SEQ ID NO: 2776
  source 1..200: mol_type = other DNA

SEQ ID NO: 3901 - DNA, 200 bp, synthetic construct; identical to SEQ ID NO: 2739
  source 1..200: mol_type = other DNA

SEQ ID NO: 3902 - DNA, 200 bp, synthetic construct
  source 1..200: mol_type = other DNA
atgaactttgcttagtggattgactcctttgctgaagtcagttattcatcaagaatgcaattagactaattgtgaataaatgattgaatgaagatataataaataaaagctataattatagataactcttattagaattttctttagcaatattcccaccccccaccccttgttttgctcttaatgtttttttcctttgg

SEQ ID NO: 3903 - DNA, 200 bp, synthetic construct
  source 1..200: mol_type = other DNA
tatactggtgatgcatctaattctccacaaagaccaataaattgaatgttttatacaattttatttttaaaaatcttgttaatgtacaggcattggcacattttaaaaacaaactacataaacagatctttcctataacctaggaaagtggaatgtcagaagtcaacaaaatgtgataaacttaaagtgctaaaacagaa

SEQ ID NO: 3904 - DNA, 200 bp, synthetic construct
  source 1..200: mol_type = other DNA
tgactgtttttcaagaagaaatgtgtttcataaaaggatatttatatctctgttgctttgactttttttatataaaatccgtgagtattaaagctttattgaaggttctttgggtaaatattagtctccctccatgacactgcagtattttttttaattaatacaagtaaaaagtttgaattttgctacatagttcaatt

SEQ ID NO: 3905 - DNA, 200 bp, synthetic construct
  source 1..200: mol_type = other DNA
ctacacatttccattttcatcataaatgacttgaaatccacaatgactaaattgtagaactttatactcactttgctatgttaagcctcaaagtgaagtccaactggaaacagaaaaataattaaaggaaacttatgctgaccaaaaatgaaggctttaaaaaatattgcataccagtcatttcaacatcctacctagtg

SEQ ID NO: 3906 - DNA, 200 bp, synthetic construct; identical to SEQ ID NO: 2806
  source 1..200: mol_type = other DNA

SEQ ID NO: 3907 - DNA, 200 bp, synthetic construct
  source 1..200: mol_type = other DNA
actccaacttagtgtctctatttatgagatcactgaacttttcaaaataaagcttttgcatagaataatgaagatctttgttttttgttttcattaaagagccattctggcactttaatgataaaatcccattgtatttaaaacatttcatgtatttctttagaacaacataaaattaaaatttaacatctgcagtgttc

SEQ ID NO: 3908 - DNA, 200 bp, synthetic construct; identical to SEQ ID NO: 2809
  source 1..200: mol_type = other DNA

SEQ ID NO: 3909 - DNA, 200 bp, synthetic construct
  source 1..200: mol_type = other DNA
gtgactctgacatcattagaagcatgccagaacagactggtgaaaagtaaaccttttcacctacaaaatttcacctgcaaaccttaaacctgcaaaattttcctttaataaaatttgcttgttttaaaaacattgtatctatttcagtatttttctctatttttgtttcaatacaatttcctgaaggttggattagagag

SEQ ID NO: 3910 - DNA, 200 bp, synthetic construct
  source 1..200: mol_type = other DNA
tgcgtgcttgtatcccagcagggcatagataatacgttattattgtctgccaagttctacatgtggagaatctgcttctgctttaaaatatcatgtgaaactccctggaaacaagaataaaaaattatgtattatgcagatgatgaaatgtttacatcattccagtaatgtcattgattttcatctttccctgtccttgc

SEQ ID NO: 3911 - DNA, 200 bp, synthetic construct
  source 1..200: mol_type = other DNA
aatttcttcaggttgaattacctagaagtttgtcactgacttgtgttcctgaactatgacacatgaatatgtgggctaagaaatagttcctcttgataaataaacaattaacaaatactttggacagtaagtctttctcagttcttaatgataatgcagggcacttactagcataagaattggtttgggatttaactgtt

SEQ ID NO: 3912 - DNA, 200 bp, synthetic construct
  source 1..200: mol_type = other DNA
aagagagagtcctcatctttcatgcttgcaagtgaaatatgttacagaacatgcacttgccctaataaaaaatcagtgaaatggtctctggtatgactgacgttcttctaagaattactgtgatgccaagtgactgtgccactgtcattgttttatcaatcgtgcatgtaaagaaaatgacaggacatgtagtcagtcag

SEQ ID NO: 3913 - DNA, 200 bp, synthetic construct
  source 1..200: mol_type = other DNA
gttcacaagaaatgcgccggtggggaatgaactgtttcattaataaaacctaatttgtcttgatccattccactctataataaaacaaaagattttgtaggcaactcggaatatagctcttttgaaagtactcgacacctttagataagaattaaaaccaacctatgtaactgacataatcttgatcttttaatttgtaa

SEQ ID NO: 3914 - DNA, 200 bp, synthetic construct
  source 1..200: mol_type = other DNA
cagcccttgagctccccaaaaacctcacccgaggctgcccactatggtcatctttttctctaaaatagccacttaccttcaataaagtatctacatgcggtgaagcattgttgactctaatgtgtgaatccaaggcaattcgttggtaacaccaactatatcttaataatctttctaaggtttgaatcccaggctgctgt

SEQ ID NO: 3915 - DNA, 200 bp, synthetic construct
  source 1..200: mol_type = other DNA
caccatgggaaagctgcaacctttctgttttatttaaagaaagcccaacattaaagggttttcattgcaagcgtgctggggagggccttgtttctgagctaccaccaccaccatccatgcaggggcggaggtgggaccagggaagctggggcacattcccaagatgggtgtctggcatggggggctatccaggtttgttg

SEQ ID NO: 3916 - DNA, 200 bp, synthetic construct
  source 1..200: mol_type = other DNA
cgacgagccgtgttgaaacttcttttgtatgtgtgtgtgtttttttcactattaaagcagtactggggaattttgtacaataaaatgtgtgcaagtgcttgtacatcactagaaaaagtccccaggccggccgggcacggtggctcacacctgtaatcccagcactttgggaggctgaggcgggcggatcacaaggtcag

SEQ ID NO: 3917 - DNA, 200 bp, synthetic construct; identical to SEQ ID NO: 2772
  source 1..200: mol_type = other DNA

SEQ ID NO: 3918 - DNA, 200 bp, synthetic construct; identical to SEQ ID NO: 2781
  source 1..200: mol_type = other DNA

SEQ ID NO: 3919 - DNA, 200 bp, synthetic construct; identical to SEQ ID NO: 2845
  source 1..200: mol_type = other DNA

SEQ ID NO: 3920 - DNA, 200 bp, synthetic construct
  source 1..200: mol_type = other DNA
ggatcccgcaataaagatgccttaagtctcccggttctggggacgcagctacggcgcctagttcgtgctccgagtcgtgtctgtgcgcgccagccgcgcgcccctcatctgtgcttgccttaggaggacactgagtctcggagctgcaggcgcactgcccggtggtccgtgagcccctccagggcggtactgaacgtcac

SEQ ID NO: 3921 - DNA, 200 bp, synthetic construct; identical to SEQ ID NO: 2762
  source 1..200: mol_type = other DNA

SEQ ID NO: 3922 - DNA, 200 bp, synthetic construct
  source 1..200: mol_type = other DNA
atctgcctgtccgggctgggacagagtctccccaaggaccccattctgcctccttctggggaaataaatgagtgtctgtttcagcagctatttgagctcctggcccgctgtccgtgtagggccccagggcatgggggtgagaagcctctgtctgcagggcttggcattcctcacacctcctccctggcaagggctgctgt

SEQ ID NO: 3923 - DNA, 200 bp, synthetic construct
  source 1..200: mol_type = other DNA
ctctgagggcctcccccacctcgggactgtgttctcggtaacctcccagccccactctggggcagatcaaatgtgagtcccactcactggccttcctttcaataaagctgcctcagcttccacacggatcattttagggggcaggggaggccctctggtgcctaggtcttccactgttgcgcactcctaggacctcagag

SEQ ID NO: 3924 - DNA, 200 bp, synthetic construct
  source 1..200: mol_type = other DNA
ctgcactgcattgggggatgtcgggtagagctggggttgtcagaggctagggcagtgactgaggacctgggcaaaacctgccacagggtgtgggaacgaggaggctccaaaatgcagaataaaaaatgctcactttgtttttatgggccctcttggccaatgaggcaacccccacaagctggggacaagcacatcacata

SEQ ID NO: 3925 - DNA, 200 bp, synthetic construct
  source 1..200: mol_type = other DNA
tgctgagggcctcaataaagtttgtgtttatgccacctggctgtgcccacccccatggtttcaaagggaggggtccctgctgggaggatttctgtgggatccccctggttggtactgggagggagttagactactgaagtagaccaccagtgagtggtagaagcttgaagggaaagtccacaactagaaacggggtgcag

SEQ ID NO: 3926 - DNA, 200 bp, synthetic construct
  source 1..200: mol_type = other DNA
aacttcaataaagatcctgtgataaaacagagctatgttcaaaggatcctgttatgtttttaaagggctgagcttggcagaaaacatgtagagtatagctttgtaccttggtatttttccccttttccaggttaaagagggagaagtggaggagtcacatacagtggtttctagtacctgtgggatcgttagacagcatg

SEQ ID NO: 3927 - DNA, 200 bp, synthetic construct
  source 1..200: mol_type = other DNA
ttctgcagagcctgagctgctgctgtggtgtggcccactggagcaaactgctggcacctattctgggttgcttgtgaacttctactcatttcctaaattaaaacatgcagctttttcacaaatttattctattattgagtggccacaatgtagagtggctcaaagtacttcaggattaggaatttgggtttgtcatagat

SEQ ID NO: 3928 - DNA, 200 bp, synthetic construct
  source 1..200: mol_type = other DNA
cccacaggagcacctcaagccatgaagtgtcagctggagaacagtggtgggcatggagaggatatgacatgaaataaaagatccagcccaactgagtgaagtggtcagtgtctctggggacactggttgcagaggggataggaggtggatcttgcattgtcgcctctactctgaatttgatgtccagcttctctccgtcc

SEQ ID NO: 3929 - DNA, 200 bp, synthetic construct
  source 1..200: mol_type = other DNA
gcagagattatttgtgatcccatccattccccaataaagcaaggcttgtccgacagcagtacccccacttcctgggggcctcctgtggttgggcttccctcctgggttcttacaggagctccagggctatgtcttagcccaaggtgtagaggtgaggcacctcaagtctttcatgccctgggaactggggtgccccaggg

SEQ ID NO: 3930 - DNA, 200 bp, synthetic construct
  source 1..200: mol_type = other DNA
agcctgggcttgctgtgccaagggggcagagcaataaataaactcttcaaccccaaagcctgcctcctgtgtccttacccagcaggatctggaagtgaagggccagtcactcaggcctctatcaaaccccttcaactgagatgcaatttttctcaaagtcacccttccctgggcccttccaaccccatcatctcagtaca

SEQ ID NO: 3931 - DNA, 200 bp, synthetic construct
  source 1..200: mol_type = other DNA
gccgtgtataatattttttttaacattttcattgcagtattgaccatcatccttggttgtgtatcgtgtaacacaaataatgatattaaaagcatcaaacaagccagcctcagctccctccctggggtgtgggcaaggggcagatgggctgggaagcagacagaactggtcctctgggcacacatgttactccacctcca

SEQ ID NO: 3932 - DNA, 200 bp, synthetic construct
  source 1..200: mol_type = other DNA
tggagctgggcttggccagggagtctgggaacaaggaagcagattttcctgattctggctctagcttccctgccaagattttggtttttatttttttatttgaactttagtcgtgtaataaactcaccagtggcaaaccagaaactgtcctctttgattggggaatgaagttgggaaagtcactagcattttccttggat

SEQ ID NO: 3933 - DNA, 200 bp, synthetic construct
  source 1..200: mol_type = other DNA
acctgccaactgattaaaggacaccagactctggatgcttggatggaaagggaaaaatggaccctgtgatgctaataaaactgttctcccttaattatgctctcctgtctttaatataaaattttataccacaaaggggaaagaaaactgattcagggctatgatgccccttgactggtctgagtgaaagacactgagga

SEQ ID NO: 3934 - DNA, 200 bp, synthetic construct
  source 1..200: mol_type = other DNA
caggtcaacggcccaagggcctcctgccctgtcctgccttggacacttccctgagaagccccttccactctcccacccaccctcttcaaatgtttactatatagagtattcaaataaactgctgcttaatcttggcctgagtcatagagtttgggttaaaagcattcacttatattcgttcaacagacattcactggata

SEQ ID NO: 3935 - DNA, 200 bp, synthetic construct; identical to SEQ ID NO: 2808
  source 1..200: mol_type = other DNA

SEQ ID NO: 3936 - DNA, 200 bp, synthetic construct; identical to SEQ ID NO: 2750
  source 1..200: mol_type = other DNA

SEQ ID NO: 3937 - DNA, 200 bp, synthetic construct; identical to SEQ ID NO: 2853
  source 1..200: mol_type = other DNA

SEQ ID NO: 3938 - DNA, 200 bp, synthetic construct
  source 1..200: mol_type = other DNA
attagaaggggaagaaacaaacaagtgccatgttcattgggggttgaagtggtggtgttctttgaaaaaccaagtgggaaaaagtaaagattaatctgtagcatgcatcattccttggctgaaataaaaagaaaaagccttaaattttgttccttattagctttattttactttatgtttttaaagtatctgggctgagt

SEQ ID NO: 3939 - DNA, 200 bp, synthetic construct
  source 1..200: mol_type = other DNA
gaagaactttcagccaataaagcttgtgcttcccccaccgagctcacgctgtctctttgttccaagtgtggttcctatttattgaggaagaaagagctgtctggccaaaggaaatctattttttcccttcatgttttctctctgaaagttggcttgagagttgttgtcagaaaggtgcaggtgctccacaaacgggtggt

SEQ ID NO: 3940 - DNA, 200 bp, synthetic construct
  source 1..200: mol_type = other DNA
cttaggcctgggggagcccatccaggaacatgcagtcccagcagaccaggctcctgagaagaactttcagccaataaagcttgtgcttcccccaccgagctcacgctgtctctttgttccaagtgtggttcctatttattgaggaagaaagagctgtctggccaaaggaaatctattttttcccttcatgttttctctct

SEQ ID NO: 3941 - DNA, 200 bp, synthetic construct
  source 1..200: mol_type = other DNA
aaaacccacatttttattacctgtcagttactttcagaatagttaagtaaaacattagctgttttatacctccaaaatatcttctgcattatatatctgtttttctcctactttggtaggtgaagaaactaatgcaaataattcttatgtgcactaaaccttgctatattgcctctcagagctcttgggaatgactttca

SEQ ID NO: 3942 - DNA, 200 bp, synthetic construct
  source 1..200: mol_type = other DNA
gcacaaaggaaaacatttcaataaaggatcatttgacaactggtggattttctggtgtggcgtcttccttgagggagctagctcctttgtggggtggtcagtggggtcagggtggcagaacctgtggagaagtaacaagcaccttgtggtgggtaacaaaactgccctgtatgggctgggctgagctcagaaaggaagcc

SEQ ID NO: 3943 - DNA, 200 bp, synthetic construct
  source 1..200: mol_type = other DNA
gtgccgccagctgccgcaccagcccgaacaccattgagggagctgggagtccctccccacagtgccacccatgcagctgctccccaggccaccccgctgatggagccccaccttgtctgctaaataaacatgtgccctcaggcctctgagtctacactgtttgacccctgggccttcgaggaaggggaggggcgggaggc

SEQ ID NO: 3944 - DNA, 200 bp, synthetic construct
  source 1..200: mol_type = other DNA
tagagggacctccctgtccctggcctgcctgggtccagatctgctaatgctttttaggagtctgcctggaaactttgacatggttcatgtttttactcaaaatccaataaaacaaggtagtttggctgtgcagttcccaccagtacttctgtctgggtggataggggaaggggggcaccccagccaactctcagccagca

SEQ ID NO: 3945 - DNA, 200 bp, synthetic construct
  source 1..200: mol_type = other DNA
ggtggagcccagtgagtctgtgggtgtgtgcaggccggggagtattaaaggtggtgatttttggagtcaagtctggtggcgtccgtcccaagtgacctgcagagcccctggtttcactgctgcttcactgatgtcctcggccccttagaactttcaggtgtgccgggcacccgcctggatgaggccaggctgcagggcgg

SEQ ID NO: 3946 - DNA, 200 bp, synthetic construct
  source 1..200: mol_type = other DNA
ctcaagccaagtccagcggccgcagtcttcacctctccacactcactttttatctggtgtttttacttctgcctgcgtttgctctctagccaataaaccgtccttgtgtgcgagtcacctgggctcctgtcagggcctggccctgagggtggtaaagggaaaggtagactcaccctctgccccactcttccacagagtga

SEQ ID NO: 3947 - DNA, 200 bp, synthetic construct
  source 1..200: mol_type = other DNA
acactcgcgaacccaaggccaggggcacacatgggccaggcaatgaggagcgtccttccttgccccacaaataaaggcacatcccaggtggctgggacctgccagtaggtgtcacaccacaagcctttctgggtacctggttgctggtctctgggggttcctggaaggaaggggatggagtcacagccaggatgaggctg

SEQ ID NO: 3948 - DNA, 200 bp, synthetic construct
  source 1..200: mol_type = other DNA
ctgttcagaccgacgttgccatcaaaacacatacacccagaaagaaacaacagaaaccaaaactcacaaggcgcatgattacttgttttatatttcatgttgggttttccctcccactattaaacagtctgtttccgtacagaacgtatgtgggttttttcagatcacagccaagaagattgccccgtttctgtggctct

SEQ ID NO: 3949 - DNA, 200 bp, synthetic construct
  source 1..200: mol_type = other DNA
tacttgttttatatttcatgttgggttttccctcccactattaaacagtctgtttccgtacagaacgtatgtgggttttttcagatcacagccaagaagattgccccgtttctgtggctctgagaagccagcagagcctccatcagccagaacactgtgtcttcaaggatggcatcagaagtcaccagcgtcgggtgttg

SEQ ID NO: 3950 - DNA, 200 bp, synthetic construct
  source 1..200: mol_type = other DNA
tgggttcagagccaggagcgctgccccagggaaagagttaatcccctgcccccagccccccagcctcggcacagctcccctaaaaagccaataaagcctgctggatacagtctcgtacgtcctgaaggtgaggtggccggaagttggcctcgtgtaggggtctggggacacaggacaggtgaagaccacagtgatgataa

SEQ ID NO: 3951 - DNA, 200 bp, synthetic construct
  source 1..200: mol_type = other DNA
gtcccatgagccttggtatcaagaggccacaagagtgggaccccaggggctcccctcccatcttgagctcttcctgaataaagcctcatacccctgtcggtgtctttctttgctcccaaggctaagctgcaggatctgcctggcaattgcaggcttgctttttcatgcccagctcatcttatctttggccagaggcggcc

SEQ ID NO: 3952 - DNA, 200 bp, synthetic construct
  source 1..200: mol_type = other DNA
cagcccccgggtctgcacctccagagcccaccctaccaccagacacagagcctggaccacctggacctaccctccagccatgacccttccctgctcccacccacctgactccaaataaagtccttctcccccagctctgggcaggcctatctgtggggacagaggggcttgcacccgctccctgggaggtctgctgggag

SEQ ID NO: 3953 - DNA, 200 bp, synthetic construct; identical to SEQ ID NO: 2859
  source 1..200: mol_type = other DNA

SEQ ID NO: 3954 - DNA, 200 bp, synthetic construct
  source 1..200: mol_type = other DNA
ctggtcaccccaggccagcgtctgttgaaggatgaagcagctcctgtccggcccagccctgcctcacagctgtgcgagctctgccctcctcagctctcaaacctgaataaatgcaccaagcccagagccccagagtgtgaccactatgaccttgggttgggcaaagagtcaggagcaaggcgaccgctgaccctgcaggg

SEQ ID NO: 3955 - DNA, 200 bp, synthetic construct
  source 1..200: mol_type = other DNA
cgccccaccccgcgtctgtcgcccaataaaggcatctttgtcgggagtgagggtgtcctgacatctgaagggccagaggtctcgggatcacttcccatccccaaaccccagggtgggacgctcagcccgatagcccagaaccacaggggcaggagcgccgggggtcgggccggtcccatcctccacgctaagaaggcgca

SEQ ID NO: 3956 - DNA, 200 bp, synthetic construct
  source 1..200: mol_type = other DNA
gcacaggactggaggggtctcaaggctcctcatggagtgggggcttcactcaagcagctggcggcagagggaaggggctgaataaacgcctggaggcctggccatgtatgtcccgtccttcctgtctgtggggcccacacgcaggctgtgggagcgggaccctcggagtcacggctggggacgcggcgcaccccacacag

SEQ ID NO: 3957 - DNA, 200 bp, synthetic construct
  source 1..200: mol_type = other DNA
agggctgagggcagctgggggaggggaattaaagcgtatttagtggctgtgcactgtcctccctgcaggccctcctgagggcagctgggggaggggaattaaagcttgtttagtggttgtgcaccgtcctccctgcaggccctcacacccctcacggctgcatcatggggggtgcacgcgcatatgggtctcatcaaagc

SEQ ID NO: 3958 - DNA, 200 bp, synthetic construct
  source 1..200: mol_type = other DNA
gggcagttgctgagcagaccgccccaccctccccggctgggagggctctggagggccctggagggggggtccccgcggcagctgacctccggtcacctgcttccccttctgtgcaaataaaccaggctgttatctggggtggcggtcctcactcccctagacaggggccgcctgcgcaggtgggggaagcagcccgatgc

SEQ ID NO: 3959 - DNA, 200 bp, synthetic construct
  source 1..200: mol_type = other DNA
aaatgctttaatggtggtgtctgtacagcatggatgtggacagggaaaacagcaagtgcacacagtgggacaggccacaggacaggctgggagtgaataaagagttcacactgcttccctgctttccccagtgactgaaggctctaggccacctcctcctcagcctcctcctcgaactcgccctcctcctcggctgtggc

SEQ ID NO: 3960 - DNA, 200 bp, synthetic construct
  source 1..200: mol_type = other DNA
gccgggcttggaacgatgtacgataccctcatagtgaccattaaacctgatcctccaccgcggccgccgcgtgggtctgtcctctcagtgctttccaggggccttcctgtgcccagcttctgggcccactcctgtgaggtcactgctgcagggccttcctgcctggacagagttggagctaggccactagaccaccccac

SEQ ID NO: 3961 - DNA, 200 bp, synthetic construct
  source 1..200: mol_type = other DNA
tgggcgggggaggggcggcctgccctcatctcatttctattaaacgcctttgccagctatacggtgtttgttttttggcctcaggtcatggcaaagtgtgcagcatgacagatttcagtgcaggcacctaagccgagttctcatgcagactcggcgctgtgaacctctttggaggtcatcttccgagtccgaaggttctg

SEQ ID NO: 3962 - DNA, 200 bp, synthetic construct; identical to SEQ ID NO: 2785
  source 1..200: mol_type = other DNA

SEQ ID NO: 3963 - DNA, 200 bp, synthetic construct
  source 1..200: mol_type = other DNA
agatcagaagatgagaggggaatgaatacttcagatgctttcaggagtgacacaagaacacaatgatttttgcttataatcactttacttagcaaattctgtaactaaaaaagtaccattagcagacaataaaatgcattaaaaatcattcatgtctttgtgttgaatgaaacttaaattttcctatcatttgagatgat

SEQ ID NO: 3964 - DNA, 200 bp, synthetic construct
  source 1..200: mol_type = other DNA
ctgaattgagaaatacttcttcaagttatgatgcttgaaagttctcaataaagttcacggtttcattaccacattgtgttgcagtagtaatttcttggagaatataaaaatccacatcaaagtccaaagatatttagcgttagcgttagacactgatgccaaaagacaagcagttattctctgtctttccaaaggaagaa

SEQ ID NO: 3965 - DNA, 200 bp, synthetic construct
  source 1..200: mol_type = other DNA
aaatacttcttcaagttatgatgcttgaaagttctcaataaagttcacggtttcattaccacattgtgttgcagtagtaatttcttggagaatataaaaatccacatcaaagtccaaagatatttagcgttagcgttagacactgatgccaaaagacaagcagttattctctgtctttccaaaggaagaaatgggagatt

SEQ ID NO: 3966 - DNA, 200 bp, synthetic construct
  source 1..200: mol_type = other DNA
gactgggtcccagagccttgaagggaacctcacaggcttagccagggcaaaaatgtgtcacagctgaggaatatctgctgttgtcatcaacaagtgctattaaaggatgtaaatccatgagtatgtttctgactcctctcagtttctgtcgctttgggttgtaggtgtctgtaagacatccaggggaagctatccccaga

SEQ ID NO: 3967 - DNA, 200 bp, synthetic construct
  source 1..200: mol_type = other DNA
taatcgggttgggacttaactttaaggtgttttcaatgtgattttagtatttacagtaataaataaaatttatacaaagtttcagagaactaccaactctctagttaattttgatgaagatgttttcattaatagtctggtttagtattaatttaaccttgaaataagaaattggtcctgatttgccaccttcatttttc

SEQ ID NO: 3968 - DNA, 200 bp, synthetic construct
  source 1..200: mol_type = other DNA
ccatgccagttttggtcaattctctatgatttacttctctcattttgccacatttactttagtagatataatttcattaaaaacaaaaaagaaacaaggtttatattaaatggaaatccataaaccacaattaatcctattttgtcatgttagttttacagaacatcatgttacattgccgacgtactgttactatttaa

SEQ ID NO: 3969 - DNA, 200 bp, synthetic construct
  source 1..200: mol_type = other DNA
ccagttgctaagtggggctcaagaagcaccgccttccccaccccctgcctgccattctgacctcttctcagagcacctaattaaaggggctgaaagtctgactcgctagtgttgattgtgttgtgaaggggatatgggatgggggtgtcaaaagctttaaaagggctgctgcaaccttccctgggtgttctggctgtata

SEQ ID NO: 3970 - DNA, 200 bp, synthetic construct
  source 1..200: mol_type = other DNA
tcctgcccggagtggaagctgaagcctgcacagtgtccaccctgttcccactcccatctttcttccggacaatgaaataaagagttaccacccagcagacactgtttctgtgtagtgcctgggaacaaacccatgttgctgatgacctggtgtgagcaccctgggaccagtggggatgagggatgccaaatgttgggttt

SEQ ID NO: 3971 - DNA, 200 bp, synthetic construct
  source 1..200: mol_type = other DNA
ttcaggatgtctatctctctctcccttctcctccatcaagctcacaggtggttaggagtcaaagagaaaaatgctgcatactcccaccttctaacctaggtaataaagttctgcactcaaaatcaagtccacatgttgtaacaggacacaaagtattatgaaggtactgcctttcccaccccaccctggagctctgagca

SEQ ID NO: 3972 - DNA, 200 bp, synthetic construct
  source 1..200: mol_type = other DNA
agggagaaggcagagaaaacacacgctcctctgcccttcctttccctggggtactactctccagcttgggaggaagcccagtagccattttgtaactgcctaccagtcgccctctgtgcctaataaagtctctttttctcacagagtgtaggcagtgttgtgtgctagggggcctggcatggggaagaaatgtgaaggct

SEQ ID NO: 3973 - DNA, 200 bp, synthetic construct; identical to SEQ ID NO: 2826
  source 1..200: mol_type = other DNA

SEQ ID NO: 3974 - DNA, 200 bp, synthetic construct
  source 1..200: mol_type = other DNA
gaagccagctgcctaggattcacaccccacctgcgcttcacttgggtccaggcctactcctgtcttctgctttgttgtgtgcctctagctgaattgagcctaaaaataaagcacaaaccacagcatgtgaagccttttattggacagggaacagacaagtgcattctgactccctcagacaagtggcagatctatgaggt

SEQ ID NO: 3975 - DNA, 200 bp, synthetic construct
  source 1..200: mol_type = other DNA
ctcttttctgccctttctttgcagctactggtgagatagtcccaagaaacagggaagagcctaggggagaggtgccctgacggcactttggtgccagcattgaggaaaacaatggacaaaataaaaagcccatcttctgataactgcgtgtgcaccaactactctgttttgaaggctctgggatgcatgtctctccttct

SEQ ID NO: 3976 - DNA, 200 bp, synthetic construct
  source 1..200: mol_type = other DNA
tgccaagtgtccctaaagatggaggaataaagccaccaattctgttgtaaataaaaataaagttacttacaaagagtcgggccaactagaggtgttcttcattgagatctaatgatgtgtagtatggtctgatgtccctttagcaattctgaggcccatggcggggttgtgagtggctagctgggaaggagctggatggg

SEQ ID NO: 3977 - DNA, 200 bp, synthetic construct
  source 1..200: mol_type = other DNA
gtcacataagacattttctttttttgttgttttggactacatatttgcactgaagcagaattgttttattaaaaaaatcatacattcccattttctataatccttcttttagataagatttatttaaaaggggatttgagttttacatctttcatagtctatttaatgtggcatctgtatttatccccaaattattttct

SEQ ID NO: 3978 - DNA, 200 bp, synthetic construct; identical to SEQ ID NO: 2834
  source 1..200: mol_type = other DNA

SEQ ID NO: 3979 - DNA, 200 bp, synthetic construct
  source 1..200: mol_type = other DNA
aagcgtacaggatgtaatgccagtggtggaaatcattaaagacactttgagtagattcatttgattgtgtgtttatactaaatgaattatttttttaagagggaggggattccaagtcacatacaaaaaatccagatacttaccaagtttcttatttatactttaagtaattgattacatatggctaaaatatacttact

SEQ ID NO: 3980 - DNA, 200 bp, synthetic construct
  source 1..200: mol_type = other DNA
gaagcattttcctgattgatgaaaaaaataactcagttatggccatctacccctgctagaaggttacagtgtattatgtagcatgcaatgtgttatgtagtgcttaataaaaataaaatgaaaaaaatgcatttcttttttttaaatatgttacacaaaatcaagcaatctacccaatgtagtctttatcacttaaaaaa

SEQ ID NO: 3981 - DNA, 200 bp, synthetic construct; identical to SEQ ID NO: 2852
  source 1..200: mol_type = other DNA

SEQ ID NO: 3982 - DNA, 200 bp, synthetic construct
  source 1..200: mol_type = other DNA
ttgctggaggagtgacagccaggagccctgacttcacttcctttggtccagttttactctgatacagggtggattccaaaactggctcagtacattgcatgtagttaagccacattttaaaaataaaggcattttttaatctatttacctggagtatatgttgcattgtcccccagtgggatcatttcgttcaagtcaga

SEQ ID NO: 3983 - DNA, 200 bp, synthetic construct; identical to SEQ ID NO: 2742
  source 1..200: mol_type = other DNA

SEQ ID NO: 3984 - DNA, 200 bp, synthetic construct; identical to SEQ ID NO: 2843
  source 1..200: mol_type = other DNA

SEQ ID NO: 3985 - DNA, 200 bp, synthetic construct
  source 1..200: mol_type = other DNA
gctggccctaggaccttcttggtttgctccttggattccccttcccactccagcaccccagccagcctggtacgcagatcccagaataaagcaccttctccctagacttggcgtgggcctccctcactccaggcaccgatgttcagtccacactttattaagaaaggaatacacacactttctccgagagccctcacggg

SEQ ID NO: 3986 - DNA, 200 bp, synthetic construct
  source 1..200: mol_type = other DNA
ggcggcaccccagccctgcccttgcttccttcaataaacatcacaggacctgggactgcacaggacctggggctgctggcttgcgttattgtgccttcccccgactgggagagctgggggcccagcgtcctcttgtctgcctggccagcagaggcaccaggcaggaaaggggtgggctttggtctagaactcccgtccct

SEQ ID NO: 3987 - DNA, 200 bp, synthetic construct
  source 1..200: mol_type = other DNA
agcctgccccatcccctcctcaccccacgagctttcacaataaattcgctccgtggcactggggaactttgtgtgtgagcgcgcgcacatttagagggtgtgtttctccaggtcctctggtggggatgtgagccttggccttttgacccagagcatcctgccaggcccgagtacaaggaaagagctttggaggtgggact

SEQ ID NO: 3988 - DNA, 200 bp, synthetic construct
  source 1..200: mol_type = other DNA
aggctgagtccgctccacctgcggctgtgcgcgcgtctgtgggctcgcgggaggggggctgtcgcgccgagggaggggccggctccagctccggggcagcgcccgccccgcccccaggcccgccccgcgctgaccggctccgcgcattggcccgccccgtgcgctggcctgtcccgcgcattggccaagcggccgggagg

SEQ ID NO: 3989 - DNA, 200 bp, synthetic construct
  source 1..200: mol_type = other DNA
ctttacacggagcggattgcaaagcaaaccaacaagaataaaggcagctgttgtctcttctccttatgggtagggctctgacaaagcttcccgattaactgaaataaaaaatatttttttttctttcagtaaacttagagtttcgtggcttcagggtgggagtagttggagcattggggatgtttttcttaccgacaagc

SEQ ID NO: 3990 - DNA, 200 bp, synthetic construct
  source 1..200: mol_type = other DNA
ggcttccaatgtgctgcccccctcttaatactcaccaataaattctacttcctgtccacctatgtctttgtatctacattcttgacggggaaggaacttcctctgggaacctttgggtcattgccctttcacttcagaaacaggttgacaactcagccctgctcatgaggcagcaaaccctgcaaagggctgggactggt

SEQ ID NO: 3991 - DNA, 208 bp, synthetic construct; identical to SEQ ID NO: 514
  source 1..208: mol_type = other DNA

SEQ ID NO: 3992 - RNA, 184 nt, synthetic construct
  source 1..184: mol_type = other RNA
actggcgcttctatctgattactctgagcgccatcaccagcgactatgtcgtagtgggtaaagccgcttacggactatgggcgcagcaaacatggcagtcctaaggacgcgggttttgctgacggtacaggccacatggcagtcgtaacgacgcgggtggtatagtccgtaagaggcatcagag

SEQ ID NO: 3993 - RNA, 170 nt, synthetic construct
  source 1..170: mol_type = other RNA
actggcgcttttatctgattactttgagagccatcaccagcgactatgtcgtagtgggtaaagctccctatgggcgcagcaaacatggcagtcctaaggacgcgggttttgctgacggtacaggccacatggcagtcgtaacgacgcgggtggtatagggagcatcaaag

SEQ ID NO: 3994 - RNA, 171 nt, synthetic construct
  source 1..171: mol_type = other RNA
actggcgcttctatctgattactctgagcgccatcaccagcgactatgtcgtagtgggtaaagccgcttacggactatgggcgcagacatggcagtcgtaacgacgcgggtctgacggtacaggccacatgaggatcacccatgtggtatagtccgtaagaggcatcagag

SEQ ID NO: 3995 - RNA, 157 nt, synthetic construct
  source 1..157: mol_type = other RNA
actggcgcttttatctgattactttgagagccatcaccagcgactatgtcgtagtgggtaaagctccctatgggcgcagacatggcagtcgtaacgacgcgggtctgacggtacaggccacatgaggatcacccatgtggtatagggagcatcaaag

SEQ ID NO: 3996 - DNA, 314 bp, synthetic construct
  source 1..314: mol_type = other DNA
gatccgacgcgccatctctaggcccgcgccggccccctcgcacggacttgtgggagaagctcggctactcccctgccccggttaatttgcatataatatttcctagtaactatagaggcttaatgtgcgataaaagacagataatctgttctttttaatactagctacattttacatgataggcttggatttctataacttcgtatagcatacattatacgaagttataaacagcacaaaaggaaactcaccctaactgtaaagtaattgtgtgttttgagactataagtatcccttggagaaccaccttgttg

SEQ ID NO: 3997 - DNA, 119 bp, synthetic construct
  source 1..119: mol_type = other DNA
ctgctaacaaagcccgaaaggaagctgagttggctgctgccaccgctgagcaataactagcataaccccttggggcctctaaacgggtcttgaggggttttttgctgaaaggaggaact

SEQ ID NO: 3998 - DNA, 175 bp, synthetic construct
  source 1..175: mol_type = other DNA
tttctccataataatgtgtgagtagttcccagataagggaattagggttcctatagggtttcgctcatgtgttgagcatataagaaacccttagtatgtatttgtatttgtaaaatacttctatcaataaaatttctaattcctaaaaccaaaatccagtactaaaatccagatc

SEQ ID NO: 3999 - DNA, 171 bp, synthetic construct
  source 1..171: mol_type = other DNA
agctcgctgatcagcctcacaagaataaaggcagctgttgtctcttcagaagtagctttgcacttttctaaactaggaatatcaccaggactgttactcaatgtgtgctgcaggaaagcactgatatatttaaaaacaaaaggtgtaacctatttattatataaagagttt

SEQ ID NO: 4000 - DNA, 241 bp, synthetic construct
  source 1..241: mol_type = other DNA
gatccagacatgataagatacattgatgagtttggacaaaccacaactagaatgcagtgaaaaaaatgctttatttgtgaaatttgtgatgctattgctttatttgtaaccattataagctgcaataaacaagttaacaacaacaattgcattcattttatgtttcaggttcagggggaggtgtgggaggttttttaaagcaagtaaaacctctacaaatgtggtatggctgattatgatc

SEQ ID NO: 4001 - DNA, 241 bp, synthetic construct
  source 1..241: mol_type = other DNA
gtcctttccacaagatatataaagccaagaaatcgaaatactttcaagttacggtaagcatatgatagtccattttaaaacataattttaaaactgcaaactacccaagaaattattactttctacgtcacgtattttgtactaatatctttgtgtttacagtcaaattaattccaattatctctctaacagccttgtatcgtatatgcaaatatgaaggaatcatgggaaataggccctc

SEQ ID NO: 4002 - DNA, 99 bp, synthetic construct
  source 1..99: mol_type = other DNA
ctctgatgcctcttacggaccgaagtccgtaagcggctttacccactacgacatagtcgctggtgatggcgctcagagtaatcagatagaagcgccagt

SEQ ID NO: 4003 - DNA, 20 bp, synthetic construct
  source 1..20: mol_type = other DNA
aaaccacaactagaatgcag

SEQ ID NO: 4004 - DNA, 15 bp, synthetic construct
  source 1..15: mol_type = other DNA
ttttttttggctagc

SEQ ID NO: 4005 - DNA, 20 bp, synthetic construct
  source 1..20: mol_type = other DNA
cggctacaaggacccttcga

SEQ ID NO: 4006 - DNA, 20 bp, synthetic construct
  source 1..20: mol_type = other DNA
caggcctgcagtttgcccat

SEQ ID NO: 4007 - RNA, 117 nt, synthetic construct
  source 1..117: mol_type = other RNA
aaagcgcctgccgaaacggtattccgaggcgccgcgtcgaatcgctatggtgtggttgttcccattagtcggcaaagagacagttgtagcggctgggaacgagacgaattcgtctct

SEQ ID NO: 4008 - RNA, 106 nt, synthetic construct
  source 1..106: mol_type = other RNA
aaagcgcctgccgaaacggtattccgaggcgccgcgtcgaatcgctatggtgtggttgttcccattagtcggcaaagagacagttgtagcggctgggaattttttt

SEQ ID NO: 4009 - RNA, 107 nt, synthetic construct
  source 1..107: mol_type = other RNA
actggcgcttttatctgattactttgagagccatcaccagcgactatgtcgtagtgggtaaagctccctcttcggagggagcatcaaagcgagacgaattcgtctct

SEQ ID NO: 4010 - RNA, 89 nt, synthetic construct; identical to SEQ ID NO: 2238
  source 1..89: mol_type = other RNA

SEQ ID NO: 4011 - RNA, 116 nt, synthetic construct
  source 1..116: mol_type = other RNA
actggcgcttctatctgattactctgagcgccatcaccagcgactatgtcgtatgggtaaagcgccttacggacttcggtccgtaaggagcatcagagcgagacgaattcgtctct

SEQ ID NO: 4012 - RNA, 98 nt, synthetic construct; identical to SEQ ID NO: 2295
  source 1..98: mol_type = other RNA

SEQ ID NO: 4013 - RNA, 117 nt, synthetic construct
  source 1..117: mol_type = other RNA
actggcgcttctatctgattactctgagcgccatcaccagcgactatgtcgtagtgggtaaagccgcttacggacttcggtccgtaagaggcatcagagcgagacgaattcgtctct

SEQ ID NO: 4014 - RNA, 99 nt, synthetic construct; identical to SEQ ID NO: 2296
  source 1..99: mol_type = other RNA

SEQ ID NO: 4015 - DNA, 2934 bp, synthetic construct
  source 1..2934: mol_type = other DNA
caagagatcaagagaatcaacaagatcagaaggagactggtcaaggacagcaacacaaagaaggccggcaagacaggccccatgaaaaccctgctcgtcagagtgatgacccctgacctgagagagcggctggaaaacctgagaaagaagcccgagaacatccctcagcctatcagcaacaccagcagggccaacctgaacaagctgctgaccgactacaccgagatgaagaaagccatcctgcacgtgtactgggaagagttccagaaagaccccgtgggcctgatgagcagagttgctcagcctgccagcaagaagatcgaccagaacaagctgaagcccgagatggacgagaagggcaatctgaccacagccggctttgcctgctctcagtgtggccagcctctgttcgtgtacaagctggaacaggtgtccgagaaaggcaaggcctacaccaactacttcggcagatgtaacgtggccgagcacgagaagctgattctgctggcccagctgaaacctgagaaggactctgatgaggccgtgacctacagcctgggcaagtttggacagagagccctggacttctacagcatccacgtgaccaaagaaagcacacaccccgtgaagcccctggctcagatcgccggcaatagatacgcctctggacctgtgggcaaagccctgtccgatgcctgcatgggaacaatcgccagcttcctgagcaagtaccaggacatcatcatcgagcaccagaaggtggtcaagggcaaccagaagagactggaaagcctgagggagctggccggcaaagagaacctggaataccccagcgtgaccctgcctcctcagcctcacacaaaagaaggcgtggacgcctacaacgaagtgatcgccagagtgagaatgtgggtcaacctgaacctgtggcagaagctgaaactgtccagggacgacgccaagcctctgctgagactgaagggcttccctagcttccctctggtggaaagacaggccaatgaagtggattggtgggacatggtctgcaacgtgaagaagctgatcaacgagaagaaagaggatggcaaggttttctggcagaacctggccggctacaagagacaagaagccctgaggccttacctgagcagcgaagaggaccggaagaagggcaagaagttcgccagataccagctgggcgacctgctgctgcacctggaaaagaagcacggcgaggactggggcaaagtgtacgatgaggcctgggagagaatcgacaagaaggtggaaggcctgagcaagcacattaagctggaagaggaaagaaggagcgaggacgcccaatctaaagccgctctgaccgattggctgagagccaaggccagctttgtgatcgagggcctgaaagaggccgacaaggacgagttctgcagatgcgagctgaagctgcagaagtggtacggcgatctgagaggcaagcccttcgccattgaggccgagaacagcatcctggacatcagcggcttcagcaagcagtacaactgcgccttcatttggcagaaagacggcgtcaagaaactgaacctgtacctgatcatcaattacttcaaaggcggcaagctgcggttcaagaagatcaaacccgaggccttcgaggctaacagattctacaccgtgatcaacaaaaagtccggcgagatcgtgcccatggaagtgaacttcaacttcgacgaccccaacctgattatcctgcctctggccttcggcaagagacagggcagagagttcatctggaacgatctgctgagcctggaaaccggctctctgaagctggccaatggcagagtgatcgagaaaaccctgtacaacaggagaaccagacaggacgagcctgctctgtttgtggccctgaccttcgagagaagagaggtgctggacagcagcaacatcaagcccatgaacctgatcggcgtggaccggggcgagaatatccctgctgtgatcgccctgacagaccctgaaggatgcccactgagcagattcaaggactccctgggcaaccctacacacatcctgagaatcggcgagagctacaaagagaagcagaggacaatccaggccaagaaagaggtggaacagagacgagccggcggatactctaggaagtacgccagcaaggccaagaatctggccgacgacatggtccgaaacaccgccagagatctgctgtactacgccgtgacacaggacgccatgctgatcttcgagaatctgagcagaggcttcggccggcagggcaagagaacctttatggccgagaggcagtacaccagaatggaagattggctcacagctaaactggcctacgagggactgcccagcaagacctacctgtccaaaacactggcccagtatacctccaagacctgcagcaattgcggcttcaccatcaccagcgccgactacgacagagtgctggaaaagctcaagaaaaccgccaccggctggatgaccaccatcaacggcaaagagctgaaggttgagggccagatcacctactacaacaggtacaagaggcagaacgtcgtgaaggatctgagcgtggaactggacagactgagcgaagagagcgtgaacaacgacatcagcagctggacaaagggcagatcaggcgaggctctgagcctgctgaagaagaggtttagccacagacctgtgcaagagaagttcgtgtgcctgaactgcggcttcgagacacacgccgatgaacaggctgccctgaacattgccagaagctggctgttcctgagaagccaagagtacaagaagtaccagaccaacaagaccaccggcaacaccgacaagagggcctttgtggaaacctggcagagcttctacagaaaaaagctgaaagaagtctggaagcccgccgtg

SEQ ID NO: 4016 - DNA, 2937 bp, synthetic construct
  source 1..2937: mol_type = other DNA
caagagatcaagagaatcaacaagatcagaaggagactggtcaaggacagcaacacaaagaaggccggcaagacaagaggccccatgaaaaccctgctcgtcagagtgatgacccctgacctgagagagcggctggaaaacctgagaaagaagcccgagaacatccctcagcctatcagcaacaccagcagggccaacctgaacaagctgctgaccgactacaccgagatgaagaaagccatcctgcacgtgtactgggaagagttccagaaagaccccgtgggcctgatgagcagagttgctcagcctgccagcaagaagatcgaccagaacaagctgaagcccgagatggacgagaagggcaatctgaccacagccggctttgcctgctctcagtgtggccagcctctgttcgtgtacaagctggaacaggtgtccgagaaaggcaaggcctacaccaactacttcggcagatgtaacgtggccgagcacgagaagctgattaagctggcccagctgaaacctgagaaggactctgatgaggccgtgacctacagcctgggcaagtttggacagagagccctggacttctacagcatccacgtgaccaaagaaagcacacaccccgtgaagcccctggctcagatcgccggcaatagatacgcctctagccctgtgggcaaagccctgtccgatgcctgcatgggaacaatcgccagcttcctgagcaagtaccaggacatcatcatcgagcaccagaaggtggtcaagggcaaccagaagagactggaaagcctgagggagctggccggcaaagagaacctggaataccccagcgtgaccctgcctcctcagcctcacacaaaagaaggcgtggacgcctacaacgaagtgatcgccagagtgagaatgtgggtcaacctgaacctgtggcagaagctgaaactgtccagggacgacgccaagcctctgctgagactgaagggcttccctagcttccctctggtggaaagacaggccaatgaagtggattggtgggacatggtctgcaacgtgaagaagctgatcaacgagaagaaagaggatggcaaggttttctggcagaacctggccggctacaagagacaagaagccctgaggccttacctgagcagcgaagaggaccggaagaagggcaagaagttcgccagataccagctgggcgacctgctgctgcacctggaaaagaagcacggcgaggactggggcaaagtgtacgatgaggcctgggagagaatcgacaagaaggtggaaggcctgagcaagcacattaagctggaagaggaaagaaggagcgaggacgcccaatctaaagccgctctgaccgattggctgagagccaaggccagctttgtgatcgagggcctgaaagaggccgacaaggacgagttctgcagatgcgagctgaagctgcagaagtggtacggcgatctgagaggcaagcccttcgccattgaggccgagaacagcatcctggacatcagcggcttcagcaagcagtacaactgcgccttcatttggcagaaagacggcgtcaagaaactgaacctgtacctgatcatcaattacttcaaaggcggcaagctgcggttcaagaagatcaaacccgaggccttcgaggctaacagattctacaccgtgatcaacaaaaagtccggcgagatcgtgcccatggaagtgaacttcaacttcgacgaccccaacctgattatcctgcctctggccttcggcaagagacagggcagagagttcatctggaacgatctgctgagcctggaaaccggctctctgaagctggccaatggcagagtgatcgagaaaaccctgtacaacaggagaaccagacaggacgagcctgctctgtttgtggccctgaccttcgagagaagagaggtgctggacagcagcaacatcaagcccatgaacctgatcggcgtggaccggggcgagaatatccctgctgtgatcgccctgacagaccctgaaggatgcccactgagcagattcaaggactccctgggcaaccctacacacatcctgagaatcggcgagagctacaaagagaagcagaggacaatccaggccaagaaagaggtggaacagagacgagccggcggatactctaggaagtacgccagcaaggccaagaatctggccgacgacatggtccgaaacaccgccagagatctgctgtactacgccgtgacacaggacgccatgctgatcttcgagaatctgagcagaggcttcggccggcagggcaagagaacctttatggccgagaggcagtacaccagaatggaagattggctcacagctaaactggcctacgagggactgcccagcaagacctacctgtccaaaacactggcccagtatacctccaagacctgcagcaattgcggcttcaccatcaccagcgccgactacgacagagtgctggaaaagctcaagaaaaccgccaccggctggatgaccaccatcaacggcaaagagctgaaggttgagggccagatcacctactacaacaggtacaagaggcagaacgtcgtgaaggatctgagcgtggaactggacagactgagcgaagagagcgtgaacaacgacatcagcagctggacaaagggcagatcaggcgaggctctgagcctgctgaagaagaggtttagccacagacctgtgcaagagaagttcgtgtgcctgaactgcggcttcgagacacacgccgatgaacaggctgccctgaacattgccagaagctggctgttcctgagaagccaagagtacaagaagtaccagaccaacaagaccaccggcaacaccgacaagagggcctttgtggaaacctggcagagcttctacagaaaaaagctgaaagaagtctggaagcccgccgtg

SEQ ID NO: 4017 - DNA, 2934 bp, synthetic construct
  source 1..2934: mol_type = other DNA
caagagatcaagagaatcaacaagatcagaaggagactggtcaaggacagcaacacaaagaaggccggcaagacaggccccatgaaaaccctgctcgtcagagtgatgacccctgacctgagagagcggctggaaaacctgagaaagaagcccgagaacatccctcagcctatcagcaacaccagcagggccaacctgaacaagctgctgaccgactacaccgagatgaagaaagccatcctgcacgtgtactgggaagagttccagaaagaccccgtgggcctgatgagcagagttgctcagcctgccagcaagaagatcgaccagaacaagctgaagcccgagatggacgagaagggcaatctgaccacagccggctttgcctgctctcagtgtggccagcctctgttcgtgtacaagctggaacaggtgtccgagaaaggcaaggcctacaccaactacttcggcagatgtaacgtggccgagcacgagaagctgattctgctggcccagctgaaacctgagaaggactctgatgaggccgtgacctacagcctgggcaagtttggacagagagccctggacttctacagcatccacgtgaccaaagaaagcacacaccccgtgaagcccctggctcagatcgccggcaatagatacgcctctggacctgtgggcaaagccctgtccgatgcctgcatgggaacaatcgccagcttcctgagcaagtaccaggacatcatcatcgagcaccagaaggtggtcaagggcaaccagaagagactggaaagcctgagggagctggccggcaaagagaacctggaataccccagcgtgaccctgcctcctcagcctcacacaaaagaaggcgtggacgcctacaacgaagtgatcgccagagtgagatggtgggtcaacctgaacctgtggcagaagctgaaactgtccagggacgacgccaagcctctgctgagactgaagggcttccctagcttccctctggtggaaagacaggccaatgaagtggattggtgggacatggtctgcaacgtgaagaagctgatcaacgagaagaaagaggatggcaaggttttctggcagaacctggccggctacaagagacaagaagccctgaggccttacctgagcagcgaagaggaccggaagaagggcaagaagttcgccagataccagctgggcgacctgctgctgcacctggaaaagaagcacggcgaggactggggcaaagtgtacgatgaggcctgggagagaatcgacaagaaggtggaaggcctgagcaagcacattaagctggaagaggaaagaaggagcgaggacgcccaatctaaagccgctctgaccgattggctgagagccaaggccagctttgtgatcgagggcctgaaagaggccgacaaggacgagttctgcagatgcgagctgaagctgcagaagtggtacggcgatctgagaggcaagcccttcgccattgaggccgagaacagcatcctggacatcagcggcttcagcaagcagtacaactgcgccttcatttggcagaaagacggcgtcaagaaactgaacctgtacctgatcatcaattacttcaaaggcggcaagctgcggttcaagaagatcaaacccgaggccttcgaggctaacagattctacaccgtgatcaacaaaaagtccggcgagatcgtgcccatggaagtgaacttcaacttcgacgaccccaacctgattatcctgcctctggccttcggcaagagacagggcagagagttcatctggaacgatctgctgagcctggaaaccggctctctgaagctggccaatggcagagtgatcgagaaaaccctgtacaacaggagaaccagacaggacgagcctgctctgtttgtggccctgaccttcgagagaagagaggtgctggacagcagcaacatcaagcccatgaacctgatcggcgtggaccggggcgagaatatccctgctgtgatcgccctgacagaccctgaaggatgcccactgagcagattcaaggactccctgggcaaccctacacacatcctgagaatcggcgagagctacaaagagaagcagaggacaatccaggccaagaaagaggtggaacagagacgagccggcggatactctaggaagtacgccagcaaggccaagaatctggccgacgacatggtccgaaacaccgccagagatctgctgtactacgccgtgacacaggacgccatgctgatcttcgagaatctgagcagaggcttcggccggcagggcaagagaacctttatggccgagaggcagtacaccagaatggaagattggctcacagctaaactggcctacgagggactgcccagcaagacctacctgtccaaaacactggcccagtatacctccaagacctgcagcaattgcggcttcaccatcaccagcgccgactacgacagagtgctggaaaagctcaagaaaaccgccaccggctggatgaccaccatcaacggcaaagagctgaaggttgagggccagatcacctactacaacaggtacaagaggcagaacgtcgtgaaggatctgagcgtggaactggacagactgagcgaagagagcgtgaacaacgacatcagcagctggacaaagggcagatcaggcgaggctctgagcctgctgaagaagaggtttagccacagacctgtgcaagagaagttcgtgtgcctgaactgcggcttcgagacacacgccgatgaacaggctgccctgaacattgccagaagctggctgttcctgagaagccaagagtacaagaagtaccagaccaacaagaccaccggcaacaccgacaagagggcctttgtggaaacctggcagagcttctacagaaaaaagctgaaagaagtctggaagcccgccgtg

SEQ ID NO: 4018 - DNA, 2934 bp, synthetic construct
  source 1..2934: mol_type = other DNA
caagagatcaagagaatcaacaagatcagaaggagactggtcaaggacagcaacacaaagaaggccggcaagacaggccccatgaaaaccctgctcgtcagagtgatgacccctgacctgagagagcggctggaaaacctgagaaagaagcccgagaacatccctcagcctatcagcaacaccagcagggccaacctgaacaagctgctgaccgactacaccgagatgaagaaagccatcctgcacgtgtactgggaagagttccagaaagaccccgtgggcctgatgagcagagttgctcagcctgccagcaagaagatcgaccagaacaagctgaagcccgagatggacgagaagggcaatctgaccacagccggctttgcctgctctcagtgtggccagcctctgttcgtgtacaagctggaacaggtgtccgagaaaggcaaggcctacaccaactacttcggcagatgtaacgtggccgagcacgagaagctgattctgctggcccagctgaaacctgagaaggactctgatgaggccgtgacctacagcctgggcaagtttggacagagagccctggacttctacagcatccacgtgaccaaagaaagcacacaccccgtgaagcccctggctcagatcgccggcaatagatacgcctctggacctgtgggcaaagccctgtccgatgcctgcatgggaacaatcgccagcttcctgagcaagtaccaggacatcatcatcgagcaccagaaggtggtcaagggcaaccagaagagactggaaagcctgagggagctggccggcaaagagaacctggaataccccagcgtgaccctgcctcctcagcctcacacaaaagaaggcgtggacgcctacaacgaagtgatcgccagagtgagaatgtgggtcaacctgaacctgtggcagaagctgaaactgtccagggacgacgccaagcctctgctgagactgaagaagttccctagcttccctctggtggaaagacaggccaatgaagtggattggtgggacatggtctgcaacgtgaagaagctgatcaacgagaagaaagaggatggcaaggttttctggcagaacctggccggctacaagagacaagaagccctgaggccttacctgagcagcgaagaggaccggaagaagggcaagaagttcgccagataccagctgggcgacctgctgctgcacctggaaaagaagcacggcgaggactggggcaaagtgtacgatgaggcctgggagagaatcgacaagaaggtggaaggcctgagcaagcacattaagctggaagaggaaagaaggagcgaggacgcccaatctaaagccgctctgaccgattggctgagagccaaggccagctttgtgatcgagggcctgaaagaggccgacaaggacgagttctgcagatgcgagctgaagctgcagaagtggtacggcgatctgagaggcaagcccttcgccattgaggccgagaacagcatcctggacatcagcggcttcagcaagcagtacaactgcgccttcatttggcagaaagacggcgtcaagaaactgaacctgtacctgatcatcaattacttcaaaggcggcaagctgcggttcaagaagatcaaacccgaggccttcgaggctaacagattctacaccgtgatcaacaaaaagtccggcgagatcgtgcccatggaagtgaacttcaacttcgacgaccccaacctgattatcctgcctctggccttcggcaagagacagggcagagagttcatctggaacgatctgctgagcctggaaaccggctctctgaagctggccaatggcagagtgatcgagaaaaccctgtacaacaggagaaccagacaggacgagcctgctctgtttgtggccctgaccttcgagagaagagaggtgctggacagcagcaacatcaagcccatgaacctgatcggcgtggaccggggcgagaatatccctgctgtgatcgccctgacagaccctgaaggatgcccactgagcagattcaaggactccctgggcaaccctacacacatcctgagaatcggcgagagctacaaagagaagcagaggacaatccaggccaagaaagaggtggaacagagacgagccggcggatactctaggaagtacgccagcaaggccaagaatctggccgacgacatggtccgaaacaccgccagagatctgctgtactacgccgtgacacaggacgccatgctgatcttcgagaatctgagcagaggcttcggccggcagggcaagagaacctttatggccgagaggcagtacaccagaatggaagattggctcacagctaaactggcctacgagggactgcccagcaagacctacctgtccaaaacactggcccagtatacctccaagacctgcagcaattgcggcttcaccatcaccagcgccgactacgacagagtgctggaaaagctcaagaaaaccgccaccggctggatgaccaccatcaacggcaaagagctgaaggttgagggccagatcacctactacaacaggtacaagaggcagaacgtcgtgaaggatctgagcgtggaactggacagactgagcgaagagagcgtgaacaacgacatcagcagctggacaaagggcagatcaggcgaggctctgagcctgctgaagaagaggtttagccacagacctgtgcaagagaagttcgtgtgcctgaactgcggcttcgagacacacgccgatgaacaggctgccctgaacattgccagaagctggctgttcctgagaagccaagagtacaagaagtaccagaccaacaagaccaccggcaacaccgacaagagggcctttgtggaaacctggcagagcttctacagaaaaaagctgaaagaagtctggaagcccgccgtg

SEQ ID NO: 4019 - DNA, 2937 bp, synthetic construct
  source 1..2937: mol_type = other DNA
caagagatcaagagaatcaacaagatcagaaggagactggtcaaggacagcaacacaaagaaggccggcaagacaagaggccccatgaaaaccctgctcgtcagagtgatgacccctgacctgagagagcggctggaaaacctgagaaagaagcccgagaacatccctcagcctatcagcaacaccagcagggccaacctgaacaagctgctgaccgactacaccgagatgaagaaagccatcctgcacgtgtactgggaagagttccagaaagaccccgtgggcctgatgagcagagttgctcagcctgccagcaagaagatcgaccagaacaagctgaagcccgagatggacgagaagggcaatctgaccacagccggctttgcctgctctcagtgtggccagcctctgttcgtgtacaagctggaacaggtgtccgagaaaggcaaggcctacaccaactacttcggcagatgtaacgtggccgagcacgagaagctgattctgctggcccagctgaaacctgagaaggactctgatgaggccgtgacctacagcctgggcaagtttggacagagagccctggacttctacagcatccacgtgaccaaagaaagcacacaccccgtgaagcccctggctcagatcgccggcaatagatacgcctctagccctgtgggcaaagccctgtccgatgcctgcatgggaacaatcgccagcttcctgagcaagtaccaggacatcatcatcgagcaccagaaggtggtcaagggcaaccagaagagactggaaagcctgagggagctggccggcaaagagaacctggaataccccagcgtgaccctgcctcctcagcctcacacaaaagaaggcgtggacgcctacaacgaagtgatcgccagagtgagaatgtgggtcaacctgaacctgtggcagaagctgaaactgtccagggacgacgccaagcctctgctgagactgaagggcttccctagcttccctctggtggaaagacaggccaatgaagtggattggtgggacatggtctgcaacgtgaagaagctgatcaacgagaagaaagaggatggcaaggttttctggcagaacctggccggctacaagagacaagaagccctgaggccttacctgagcagcgaagaggaccggaagaagggcaagaagttcgccagataccagctgggcgacctgctgctgcacctggaaaagaagcacggcgaggactggggcaaagtgtacgatgaggcctgggagagaatcgacaagaaggtggaaggcctgagcaagcacattaagctggaagaggaaagaaggagcgaggacgcccaatctaaagccgctctgaccgattggctgagagccaaggccagctttgtgatcgagggcctgaaagaggccgacaaggacgagttctgcagatgcgagctgaagctgcagaagtggtacggcgatctgagaggcaagcccttcgccattgaggccgagaacagcatcctggacatcagcggcttcagcaagcagtacaactgcgccttcatttggcagaaagacggcgtcaagaaactgaacctgtacctgatcatcaattacttcaaaggcggcaagctgcggttcaagaagatcaaacccgaggccttcgaggctaacagattctacaccgtgatcaacaaaaagtccggcgagatcgtgcccatggaagtgaacttcaacttcgacgaccccaacctgattatcctgcctctggccttcggcaagagacagggcagagagttcatctggaacgatctgctgagcctggaaaccggctctctgaagctggccaatggcagagtgatcgagaaaaccctgtacaacaggagaaccagacaggacgagcctgctctgtttgtggccctgaccttcgagagaagagaggtgctggacagcagcaacatcaagcccatgaacctgatcggcgtggaccggggcgagaatatccctgctgtgatcgccctgacagaccctgaaggatgcccactgagcagattcaaggactccctgggcaaccctacacacatcctgagaatcggcgagagctacaaagagaagcagaggacaatccaggccaagaaagaggtggaacagagacgagccggcggatactctaggaagtacgccagcaaggccaagaatctggccgacgacatggtccgaaacaccgccagagatctgctgtactacgccgtgacacaggacgccatgctgatcttcgagaatctgagcagaggcttcggccggcagggcaagagaacctttatggccgagaggcagtacaccagaatggaagattggctcacagctaaactggcctacgagggactgcccagcaagacctacctgtccaaaacactggcccagtatacctccaagacctgcagcaattgcggcttcaccatcaccagcgccgactacgacagagtgctggaaaagctcaagaaaaccgccaccggctggatgaccaccatcaacggcaaagagctgaaggttgagggccagatcacctactacaacaggtacaagaggcagaacgtcgtgaaggatctgagcgtggaactggacagactgagcgaagagagcgtgaacaacgacatcagcagctggacaaagggcagatcaggcgaggctctgagcctgctgaagaagaggtttagccacagacctgtgcaagagaagttcgtgtgcctgaactgcggcttcgagacacacgccgatgaacaggctgccctgaacattgccagaagctggctgttcctgagaagccaagagtacaagaagtaccagaccaacaagaccaccggcaacaccgacaagagggcctttgtggaaacctggcagagcttctacagaaaaaagctgaaagaagtctggaagcccgccgtg

SEQ ID NO: 4020 - DNA, 2934 bp, synthetic construct
  source 1..2934: mol_type = other DNA
caagagatcaagagaatcaacaagatcagaaggagactggtcaaggacagcaacacaaagaaggccggcaagacaggccccatgaaaaccctgctcgtcagagtgatgacccctgacctgagagagcggctggaaaacctgagaaagaagcccgagaacatccctcagcctatcagcaacaccagcagggccaacctgaacaagctgctgaccgactacaccgagatgaagaaagccatcctgcacgtgtactgggaagagttccagaaagaccccgtgggcctgatgagcagagttgctcagcctgccagcaagaagatcgaccagaacaagctgaagcccgagatggacgagaagggcaatctgaccacagccggctttgcctgctctcagtgtggccagcctctgttcgtgtacaagctggaacaggtgtccgagaaaggcaaggcctacaccaactacttcggcagatgtaacgtggccgagcacgagaagctgattaagctggcccagctgaaacctgagaaggactctgatgaggccgtgacctacagcctgggcaagtttggacagagagccctggacttctacagcatccacgtgaccaaagaaagcacacaccccgtgaagcccctggctcagatcgccggcaatagatacgcctctagccctgtgggcaaagccctgtccgatgcctgcatgggaacaatcgccagcttcctgagcaagtaccaggacatcatcatcgagcaccagaaggtggtcaagggcaaccagaagagactggaaagcctgagggagctggccggcaaagagaacctggaataccccagcgtgaccctgcctcctcagcctcacacaaaagaaggcgtggacgcctacaacgaagtgatcgccagagtgagaatgtgggtcaacctgaacctgtggcagaagctgaaactgtccagggacgacgccaagcctctgctgagactgaagggcttccctagcttccctctggtggaaagacaggccaatgaagtggattggtgggacatggtctgcaacgtgaagaagctgatcaacgagaagaaagaggatggcaaggttttctggcagaacctggccggctacaagagacaagaagccctgaggccttacctgagcagcgaagaggaccggaagaagggcaagaagttcgccagataccagctgggcgacctgctgctgcacctggaaaagaagcacggcgaggactggggcaaagtgtacgatgaggcctgggagagaatcgacaagaaggtggaaggcctgagcaagcacattaagctggaagaggaaagaaggagcgaggacgcccaatctaaagccgctctgaccgattggctgagagccaaggccagctttgtgatcgagggcctgaaagaggccgacaaggacgagttctgcagatgcgagctgaagctgcagaagtggtacggcgatctgagaggcaagcccttcgccattgaggccgagaacagcatcctggacatcagcggcttcagcaagcagtacaactgcgccttcatttggcagaaagacggcgtcaagaaactgaacctgtacctgatcatcaattacttcaaaggcggcaagctgcggttcaagaagatcaaacccgaggccttcgaggctaacagattctacaccgtgatcaacaaaaagtccggcgagatcgtgcccatggaagtgaacttcaacttcgacgaccccaacctgattatcctgcctctggccttcggcaagagacagggcagagagttcatctggaacgatctgctgagcctggaaaccggctctctgaagctggccaatggcagagtgatcgagaaaaccctgtacaacaggagaaccagacaggacgagcctgctctgtttgtggccctgaccttcgagagaagagaggtgctggacagcagcaacatcaagcccatgaacctgatcggcgtggaccggggcgagaatatccctgctgtgatcgccctgacagaccctgaaggatgcccactgagcagattcaaggactccctgggcaaccctacacacatcctgagaatcggcgagagctacaaagagaagcagaggacaatccaggccaagaaagaggtggaacagagacgagccggcggatactctaggaagtacgccagcaaggccaagaatctggccgacgacatggtccgaaacaccgccagagatctgctgtactacgccgtgacacaggacgccatgctgatcttcgagaatctgagcagaggcttcggccggcagggcaagagaacctttatggccgagaggcagtacaccagaatggaagattggctcacagctaaactggcctacgagggactgcccagcaagacctacctgtccaaaacactggcccagtatacctccaagacctgcagcaattgcggcttcaccatcaccagcgccgactacgacagagtgctggaaaagctcaagaaaaccgccaccggctggatgaccaccatcaacggcaaagagctgaaggttgagggccagatcacctactacaacaggtacaagaggcagaacgtcgtgaaggatctgagcgtggaactggacagactgagcgaagagagcgtgaacaacgacatcagcagctggacaaagggcagatcaggcgaggctctgagcctgctgaagaagaggtttagccacagacctgtgcaagagaagttcgtgtgcctgaactgcggcttcgagacacacgccgatgaacaggctgccctgaacattgccagaagctggctgttcctgagaagccaagagtacaagaagtaccagaccaacaagaccaccggcaacaccgacaagagggcctttgtggaaacctggcagagcttctacagaaaaaagctgaaagaagtctggaagcccgccgtg

SEQ ID NO: 4021 - DNA, 2931 bp, synthetic construct
  source 1..2931: mol_type = other DNA
caagagatcaagaggatcaacaagattagaagaaggctggtcaaggacagcaacaccaagaaggcaggcaagacaggccccatgaagaccctgcttgtcagagtgatgacccctgacctgagagagagactggaaaacctgagaaagaagcctgagaacatccctcagcctatctccaacaccagcagagccaacctgaacaagctgctgacagactacacagagatgaagaaagccatcctgcatgtgtactgggaagagttccagaaagaccctgtgggcctgatgagcagagtggcccagcctgccagcaagaagattgaccagaacaaactgaagccagagatggatgagaagggcaacctgaccacagctggctttgcctgctctcagtgtggccagcctctgtttgtgtacaagctggaacaagtgtctgagaaaggcaaggcctacaccaactactttggcagatgcaatgtggctgagcatgagaagctgatcctgctggcccagctgaagcctgaaaaggactctgatgaggctgtgacctacagcctgggcaagtttggacagagagccctggacttctacagcatccatgtgaccaaagaaagcacacaccctgtgaagcccctggctcagattgctggcaacagatatgcctctggacctgtgggcaaagccctgtctgatgcctgcatgggaaccattgccagctttctgagcaagtaccaggacatcatcattgagcaccagaaagtggtcaaggggaaccagaagaggctggaatctctgagagagctggctggcaaagagaacctggaatacccctctgtgaccctgcctcctcagcctcacaccaaagagggtgttgatgcctacaatgaagtgattgccagagtcaggatgtgggtcaacctgaatctgtggcagaagctgaagctgagcagggatgatgccaagcctctgctgagactgaagggcttccctagcttcccactggtggaaaggcaggctaatgaagtggattggtgggacatggtctgcaatgtgaagaaactgatcaatgagaagaaagaggatggcaaggttttctggcagaacctggctggctacaagaggcaagaagccctgaggccttacctgtcctctgaggaagataggaagaaggggaagaagtttgccagataccagctgggagatctgctgctgcacctggaaaagaaacatggggaagattggggcaaagtgtatgatgaggcctgggagagaattgacaagaaggtggaaggcctgagcaagcacattaagctggaagaggaaagaagatctgaggatgcccagagcaaggctgccctgactgattggctgagagccaaggccagctttgtgattgagggcctgaaagaggctgacaaggatgagttctgtagatgtgaactgaagctgcaaaagtggtatggggacctgaggggcaagccctttgccattgaggcagagaacagcatcctggacatcagtggcttcagcaagcagtacaactgtgccttcatttggcagaaggatggggttaagaagctcaacctgtacctgatcatcaactacttcaaaggtggcaagctgaggttcaagaagatcaagccagaggcctttgaggccaacaggttctacacagtgatcaacaaaaagtctggggagattgtgcccatggaagtgaacttcaactttgatgatcccaacctcatcatcctgccactggcctttggcaagagacagggcagagaattcatctggaatgacctgctgagcctggaaacaggcagcctgaaactggccaatggcagagtgattgagaaaaccctgtacaacagaaggaccagacaggatgagcctgcactgtttgtggccctgacctttgagagaagggaagtgctggatagcagcaacatcaagcccatgaacctgattggagtggacagaggggagaatatccctgctgtcattgccctgacagaccctgagggctgtcccctgagcagattcaaggactccctgggcaaccccacacacattctgagaattggggagagctacaaagagaagcagagaaccatccaggccaagaaagaagtggaacagaggagagctggaggctactctaggaagtatgccagcaaagccaagaatctggctgatgacatggtcagaaacacagccagggacctgctgtactatgctgtgacccaggatgccatgctgatctttgagaatctgagcagaggatttgggagacaaggcaagaggaccttcatggctgaaagacagtacaccaggatggaagattggctgactgccaaactggcctatgagggactgagcaagacctacctgtccaagacactggcccagtatacctccaagacctgcagcaattgtggcttcaccatcacctctgcagactatgacagagtgctggaaaagctcaagaaaacagccacaggctggatgaccaccatcaatgggaaagagctgaaggttgagggccagatcacctactacaacagatacaaaaggcagaatgtggttaaggacctgtctgtggaactggacagactgtctgaggaatctgtgaacaatgacatcagcagctggaccaagggcagatctggggaagctctgagcctgctgaagaagagattcagccacagacctgtgcaagagaagtttgtgtgtctgaactgtggctttgagacacatgctgatgaacaggctgctctgaacattgccagaagctggctgttcctgagaagccaagagtacaagaagtaccagaccaacaagaccacaggcaacactgacaagagggcctttgtggaaacctggcagagcttctacagaaagaaactcaaagaagtctggaagcctgctgtg

SEQ ID NO: 4022 - DNA, 2934 bp, synthetic construct
  source 1..2934: mol_type = other DNA
caagagatcaagaggatcaacaagattagaagaaggctggtcaaggacagcaacaccaagaaggcaggcaagacaggccccatgaagaccctgcttgtcagagtgatgacccctgacctgagagagagactggaaaacctgagaaagaagcctgagaacatccctcagcctatctccaacaccagcagagccaacctgaacaagctgctgacagactacacagagatgaagaaagccatcctgcatgtgtactgggaagagttccagaaagaccctgtgggcctgatgagcagagtggcccagcctgccagcaagaagattgaccagaacaaactgaagccagagatggatgagaagggcaacctgaccacagctggctttgcctgctctcagtgtggccagcctctgtttgtgtacaagctggaacaagtgtctgagaaaggcaaggcctacaccaactactttggcagatgcaatgtggctgagcatgagaagctgatcctgctggcccagctgaagcctgaaaaggactctgatgaggctgtgacctacagcctgggcaagtttggacagagagccctggacttctacagcatccatgtgaccaaagaaagcacacaccctgtgaagcccctggctcagattgctggcaacagatatgcctctggacctgtgggcaaagccctgtctgatgcctgcatgggaaccattgccagctttctgagcaagtaccaggacatcatcattgagcaccagaaagtggtcaaggggaaccagaagaggctggaatctctgagagagctggctggcaaagagaacctggaatacccctctgtgaccctgcctcctcagcctcacaccaaagagggtgttgatgcctacaatgaagtgattgccagagtcaggatgtgggtcaacctgaatctgtggcagaagctgaagctgagcagggatgatgccaagcctctgctgagactgaagggcttccctagcttcccactggtggaaaggcaggctaatgaagtggattggtgggacatggtctgcaatgtgaagaaactgatcaatgagaagaaagaggatggcaaggttttctggcagaacctggctggctacaagaggcaagaagccctgaggccttacctgtcctctgaggaagataggaagaaggggaagaagtttgccagataccagctgggagatctgctgctgcacctggaaaagaaacatggggaagattggggcaaagtgtatgatgaggcctgggagagaattgacaagaaggtggaaggcctgagcaagcacattaagctggaagaggaaagaagatctgaggatgcccagagcaaggctgccctgactgattggctgagagccaaggccagctttgtgattgagggcctgaaagaggctgacaaggatgagttctgtagatgtgaactgaagctgcaaaagtggtatggggacctgaggggcaagccctttgccattgaggcagagaacagcatcctggacatcagtggcttcagcaagcagtacaactgtgccttcatttggcagaaggatggggttaagaagctcaacctgtacctgatcatcaactacttcaaaggtggcaagctgaggttcaagaagatcaagccagaggcctttgaggccaacaggttctacacagtgatcaacaaaaagtctggggagattgtgcccatggaagtgaacttcaactttgatgatcccaacctcatcatcctgccactggcctttggcaagagacagggcagagaattcatctggaatgacctgctgagcctggaaacaggcagcctgaaactggccaatggcagagtgattgagaaaaccctgtacaacagaaggaccagacaggatgagcctgcactgtttgtggccctgacctttgagagaagggaagtgctggatagcagcaacatcaagcccatgaacctgattggagtggacagaggggagaatatccctgctgtcattgccctgacagaccctgagggctgtcccctgagcagattcaaggactccctgggcaaccccacacacattctgagaattggggagagctacaaagagaagcagagaaccatccaggccaagaaagaagtggaacagaggagagctggaggctactctaggaagtatgccagcaaagccaagaatctggctgatgacatggtcagaaacacagccagggacctgctgtactatgctgtgacccaggatgccatgctgatctttgagaatctgagcagaggatttgggagacaaggcaagaggaccttcatggctgaaagacagtacaccaggatggaagattggctgactgccaaactggcctatgagggactgcccagcaagacctacctgtccaagacactggcccagtatacctccaagacctgcagcaattgtggcttcaccatcacctctgcagactatgacagagtgctggaaaagctcaagaaaacagccacaggctggatgaccaccatcaatgggaaagagctgaaggttgagggccagatcacctactacaacagatacaaaaggcagaatgtggttaaggacctgtctgtggaactggacagactgtctgaggaatctgtgaacaatgacatcagcagctggaccaagggcagatctggggaagctctgagcctgctgaagaagagattcagccacagacctgtgcaagagaagtttgtgtgtctgaactgtggctttgagacacatgctgatgaacaggctgctctgaacattgccagaagctggctgttcctgagaagccaagagtacaagaagtaccagaccaacaagaccacaggcaacactgacaagagggcctttgtggaaacctggcagagcttctacagaaagaaactcaaagaagtctggaagcctgctgtg

SEQ ID NO: 4023 - DNA, 2934 bp, synthetic construct
  source 1..2934: mol_type = other DNA
caagagatcaagaggatcaacaagattagaagaaggctggtcaaggacagcaacaccaagaaggcaggcaagacaggccccatgaagaccctgcttgtcagagtgatgacccctgacctgagagagagactggaaaacctgagaaagaagcctgagaacatccctcagcctatctccaacaccagcagagccaacctgaacaagctgctgacagactacacagagatgaagaaagccatcctgcatgtgtactgggaagagttccagaaagaccctgtgggcctgatgagcagagtggcccagcctgccagcaagaagattgaccagaacaaactgaagccagagatggatgagaagggcaacctgaccacagctggctttgcctgctctcagtgtggccagcctctgtttgtgtacaagctggaacaagtgtctgagaaaggcaaggcctacaccaactactttggcagatgcaatgtggctgagcatgagaagctgatcctgctggcccagctgaagcctgaaaaggactctgatgaggctgtgacctacagcctgggcaagtttggacagagagccctggacttctacagcatccatgtgaccaaagaaagcacacaccctgtgaagcccctggctcagattgctggcaacagatatgcctctggacctgtgggcaaagccctgtctgatgcctgcatgggaaccattgccagctttctgagcaagtaccaggacatcatcattgagcaccagaaagtggtcaaggggaaccagaagaggctggaatctctgagagagctggctggcaaagagaacctggaatacccctctgtgaccctgcctcctcagcctcacaccaaagagggtgttgatgcctacaatgaagtgattgccagagtcaggtggtgggtcaacctgaatctgtggcagaagctgaagctgagcagggatgatgccaagcctctgctgagactgaagggcttccctagcttcccactggtggaaaggcaggctaatgaagtggattggtgggacatggtctgcaatgtgaagaaactgatcaatgagaagaaagaggatggcaaggttttctggcagaacctggctggctacaagaggcaagaagccctgaggccttacctgtcctctgaggaagataggaagaaggggaagaagtttgccagataccagctgggagatctgctgctgcacctggaaaagaaacatggggaagattggggcaaagtgtatgatgaggcctgggagagaattgacaagaaggtggaaggcctgagcaagcacattaagctggaagaggaaagaagatctgaggatgcccagagcaaggctgccctgactgattggctgagagccaaggccagctttgtgattgagggcctgaaagaggctgacaaggatgagttctgtagatgtgaactgaagctgcaaaagtggtatggggacctgaggggcaagccctttgccattgaggcagagaacagcatcctggacatcagtggcttcagcaagcagtacaactgtgccttcatttggcagaaggatggggttaagaagctcaacctgtacctgatcatcaactacttcaaaggtggcaagctgaggttcaagaagatcaagccagaggcctttgaggccaacaggttctacacagtgatcaacaaaaagtctggggagattgtgcccatggaagtgaacttcaactttgatgatcccaacctcatcatcctgccactggcctttggcaagagacagggcagagaattcatctggaatgacctgctgagcctggaaacaggcagcctgaaactggccaatggcagagtgattgagaaaaccctgtacaacagaaggaccagacaggatgagcctgcactgtttgtggccctgacctttgagagaagggaagtgctggatagcagcaacatcaagcccatgaacctgattggagtggacagaggggagaatatccctgctgtcattgccctgacagaccctgagggctgtcccctgagcagattcaaggactccctgggcaaccccacacacattctgagaattggggagagctacaaagagaagcagagaaccatccaggccaagaaagaagtggaacagaggagagctggaggctactctaggaagtatgccagcaaagccaagaatctggctgatgacatggtcagaaacacagccagggacctgctgtactatgctgtgacccaggatgccatgctgatctttgagaatctgagcagaggatttgggagacaaggcaagaggaccttcatggctgaaagacagtacaccaggatggaagattggctgactgccaaactggcctatgagggactgcccagcaagacctacctgtccaagacactggcccagtatacctccaagacctgcagcaattgtggcttcaccatcacctctgcagactatgacagagtgctggaaaagctcaagaaaacagccacaggctggatgaccaccatcaatgggaaagagctgaaggttgagggccagatcacctactacaacagatacaaaaggcagaatgtggttaaggacctgtctgtggaactggacagactgtctgaggaatctgtgaacaatgacatcagcagctggaccaagggcagatctggggaagctctgagcctgctgaagaagagattcagccacagacctgtgcaagagaagtttgtgtgtctgaactgtggctttgagacacatgctgatgaacaggctgctctgaacattgccagaagctggctgttcctgagaagccaagagtacaagaagtaccagaccaacaagaccacaggcaacactgacaagagggcctttgtggaaacctggcagagcttctacagaaagaaactcaaagaagtctggaagcctgctgtg

SEQ ID NO: 4024 - DNA, 2934 bp, synthetic construct
  source 1..2934: mol_type = other DNA
caagagatcaagaggatcaacaagattagaagaaggctggtcaaggacagcaacaccaagaaggcaggcaagacaggccccatgaagaccctgcttgtcagagtgatgacccctgacctgagagagagactggaaaacctgagaaagaagcctgagaacatccctcagcctatctccaacaccagcagagccaacctgaacaagctgctgacagactacacagagatgaagaaagccatcctgcatgtgtactgggaagagttccagaaagaccctgtgggcctgatgagcagagtggcccagcctgccagcaagaagattgaccagaacaaactgaagccagagatggatgagaagggcaacctgaccacagctggctttgcctgctctcagtgtggccagcctctgtttgtgtacaagctggaacaagtgtctgagaaaggcaaggcctacaccaactactttggcagatgcaatgtggctgagcatgagaagctgatcctgctggcccagctgaagcctgaaaaggactctgatgaggctgtgacctacagcctgggcaagtttggacagagagccctggacttctacagcatccatgtgaccaaagaaagcacacaccctgtgaagcccctggctcagattgctggcaacagatatgcctctggacctgtgggcaaagccctgtctgatgcctgcatgggaaccattgccagctttctgagcaagtaccaggacatcatcattgagcaccagaaagtggtcaaggggaaccagaagaggctggaatctctgagagagctggctggcaaagagaacctggaatacccctctgtgaccctgcctcctcagcctcacaccaaagagggtgttgatgcctacaatgaagtgattgccagagtcaggatgtgggtcaacctgaatctgtggcagaagctgaagctgagcagggatgatgccaagcctctgctgagactgaagaagttccctagcttcccactggtggaaaggcaggctaatgaagtggattggtgggacatggtctgcaatgtgaagaaactgatcaatgagaagaaagaggatggcaaggttttctggcagaacctggctggctacaagaggcaagaagccctgaggccttacctgtcctctgaggaagataggaagaaggggaagaagtttgccagataccagctgggagatctgctgctgcacctggaaaagaaacatggggaagattggggcaaagtgtatgatgaggcctgggagagaattgacaagaaggtggaaggcctgagcaagcacattaagctggaagaggaaagaagatctgaggatgcccagagcaaggctgccctgactgattggctgagagccaaggccagctttgtgattgagggcctgaaagaggctgacaaggatgagttctgtagatgtgaactgaagctgcaaaagtggtatggggacctgaggggcaagccctttgccattgaggcagagaacagcatcctggacatcagtggcttcagcaagcagtacaactgtgccttcatttggcagaaggatggggttaagaagctcaacctgtacctgatcatcaactacttcaaaggtggcaagctgaggttcaagaagatcaagccagaggcctttgaggccaacaggttctacacagtgatcaacaaaaagtctggggagattgtgcccatggaagtgaacttcaactttgatgatcccaacctcatcatcctgccactggcctttggcaagagacagggcagagaattcatctggaatgacctgctgagcctggaaacaggcagcctgaaactggccaatggcagagtgattgagaaaaccctgtacaacagaaggaccagacaggatgagcctgcactgtttgtggccctgacctttgagagaagggaagtgctggatagcagcaacatcaagcccatgaacctgattggagtggacagaggggagaatatccctgctgtcattgccctgacagaccctgagggctgtcccctgagcagattcaaggactccctgggcaaccccacacacattctgagaattggggagagctacaaagagaagcagagaaccatccaggccaagaaagaagtggaacagaggagagctggaggctactctaggaagtatgccagcaaagccaagaatctggctgatgacatggtcagaaacacagccagggacctgctgtactatgctgtgacccaggatgccatgctgatctttgagaatctgagcagaggatttgggagacaaggcaagaggaccttcatggctgaaagacagtacaccaggatggaagattggctgactgccaaactggcctatgagggactgcccagcaagacctacctgtccaagacactggcccagtatacctccaagacctgcagcaattgtggcttcaccatcacctctgcagactatgacagagtgctggaaaagctcaagaaaacagccacaggctggatgaccaccatcaatgggaaagagctgaaggttgagggccagatcacctactacaacagatacaaaaggcagaatgtggttaaggacctgtctgtggaactggacagactgtctgaggaatctgtgaacaatgacatcagcagctggaccaagggcagatctggggaagctctgagcctgctgaagaagagattcagccacagacctgtgcaagagaagtttgtgtgtctgaactgtggctttgagacacatgctgatgaacaggctgctctgaacattgccagaagctggctgttcctgagaagccaagagtacaagaagtaccagaccaacaagaccacaggcaacactgacaagagggcctttgtggaaacctggcagagcttctacagaaagaaactcaaagaagtctggaagcctgctgtg

SEQ ID NO: 4025 - DNA, 2937 bp, synthetic construct
  source 1..2937: mol_type = other DNA
caagagatcaagaggatcaacaagattagaagaaggctggtcaaggacagcaacaccaagaaggcaggcaagacaagaggccccatgaagaccctgcttgtcagagtgatgacccctgacctgagagagagactggaaaacctgagaaagaagcctgagaacatccctcagcctatctccaacaccagcagagccaacctgaacaagctgctgacagactacacagagatgaagaaagccatcctgcatgtgtactgggaagagttccagaaagaccctgtgggcctgatgagcagagtggcccagcctgccagcaagaagattgaccagaacaaactgaagccagagatggatgagaagggcaacctgaccacagctggctttgcctgctctcagtgtggccagcctctgtttgtgtacaagctggaacaagtgtctgagaaaggcaaggcctacaccaactactttggcagatgcaatgtggctgagcatgagaagctgatcctgctggcccagctgaagcctgaaaaggactctgatgaggctgtgacctacagcctgggcaagtttggacagagagccctggacttctacagcatccatgtgaccaaagaaagcacacaccctgtgaagcccctggctcagattgctggcaacagatatgcctctagccctgtgggcaaagccctgtctgatgcctgcatgggaaccattgccagctttctgagcaagtaccaggacatcatcattgagcaccagaaagtggtcaaggggaaccagaagaggctggaatctctgagagagctggctggcaaagagaacctggaatacccctctgtgaccctgcctcctcagcctcacaccaaagagggtgttgatgcctacaatgaagtgattgccagagtcaggatgtgggtcaacctgaatctgtggcagaagctgaagctgagcagggatgatgccaagcctctgctgagactgaagggcttccctagcttcccactggtggaaaggcaggctaatgaagtggattggtgggacatggtctgcaatgtgaagaaactgatcaatgagaagaaagaggatggcaaggttttctggcagaacctggctggctacaagaggcaagaagccctgaggccttacctgtcctctgaggaagataggaagaaggggaagaagtttgccagataccagctgggagatctgctgctgcacctggaaaagaaacatggggaagattggggcaaagtgtatgatgaggcctgggagagaattgacaagaaggtggaaggcctgagcaagcacattaagctggaagaggaaagaagatctgaggatgcccagagcaaggctgccctgactgattggctgagagccaaggccagctttgtgattgagggcctgaaagaggctgacaaggatgagttctgtagatgtgaactgaagctgcaaaagtggtatggggacctgaggggcaagccctttgccattgaggcagagaacagcatcctggacatcagtggcttcagcaagcagtacaactgtgccttcatttggcagaaggatggggttaagaagctcaacctgtacctgatcatcaactacttcaaaggtggcaagctgaggttcaagaagatcaagccagaggcctttgaggccaacaggttctacacagtgatcaacaaaaagtctggggagattgtgcccatggaagtgaacttcaactttgatgatcccaacctcatcatcctgccactggcctttggcaagagacagggcagagaattcatctggaatgacctgctgagcctggaaacaggcagcctgaaactggccaatggcagagtgattgagaaaaccctgtacaacagaaggaccagacaggatgagcctgcactgtttgtggccctgacctttgagagaagggaagtgctggatagcagcaacatcaagcccatgaacctgattggagtggacagaggggagaatatccctgctgtcattgccctgacagaccctgagggctgtcccctgagcagattcaaggactccctgggcaaccccacacacattctgagaattggggagagctacaaagagaagcagagaaccatccaggccaagaaagaagtggaacagaggagagctggaggctactctaggaagtatgccagcaaagccaagaatctggctgatgacatggtcagaaacacagccagggacctgctgtactatgctgtgacccaggatgccatgctgatctttgagaatctgagcagaggatttgggagacaaggcaagaggaccttcatggctgaaagacagtacaccaggatggaagattggctgactgccaaactggcctatgagggactgcccagcaagacctacctgtccaagacactggcccagtatacctccaagacctgcagcaattgtggcttcaccatcacctctgcagactatgacagagtgctggaaaagctcaagaaaacagccacaggctggatgaccaccatcaatgggaaagagctgaaggttgagggccagatcacctactacaacagatacaaaaggcagaatgtggttaaggacctgtctgtggaactggacagactgtctgaggaatctgtgaacaatgacatcagcagctggaccaagggcagatctggggaagctctgagcctgctgaagaagagattcagccacagacctgtgcaagagaagtttgtgtgtctgaactgtggctttgagacacatgctgatgaacaggctgctctgaacattgccagaagctggctgttcctgagaagccaagagtacaagaagtaccagaccaacaagaccacaggcaacactgacaagagggcctttgtggaaacctggcagagcttctacagaaagaaactcaaagaagtctggaagcctgctgtg

SEQ ID NO: 4026 - DNA, 2937 bp, synthetic construct
  source 1..2937: mol_type = other DNA
caagagatcaagaggatcaacaagattagaagaaggctggtcaaggacagcaacaccaagaaggcaggcaagacaagaggccccatgaagaccctgcttgtcagagtgatgacccctgacctgagagagagactggaaaacctgagaaagaagcctgagaacatccctcagcctatctccaacaccagcagagccaacctgaacaagctgctgacagactacacagagatgaagaaagccatcctgcatgtgtactgggaagagttccagaaagaccctgtgggcctgatgagcagagtggcccagcctgccagcaagaagattgaccagaacaaactgaagccagagatggatgagaagggcaacctgaccacagctggctttgcctgctctcagtgtggccagcctctgtttgtgtacaagctggaacaagtgtctgagaaaggcaaggcctacaccaactactttggcagatgcaatgtggctgagcatgagaagctgatcaagctggcccagctgaagcctgaaaaggactctgatgaggctgtgacctacagcctgggcaagtttggacagagagccctggacttctacagcatccatgtgaccaaagaaagcacacaccctgtgaagcccctggctcagattgctggcaacagatatgcctctagccctgtgggcaaagccctgtctgatgcctgcatgggaaccattgccagctttctgagcaagtaccaggacatcatcattgagcaccagaaagtggtcaaggggaaccagaagaggctggaatctctgagagagctggctggcaaagagaacctggaatacccctctgtgaccctgcctcctcagcctcacaccaaagagggtgttgatgcctacaatgaagtgattgccagagtcaggatgtgggtcaacctgaatctgtggcagaagctgaagctgagcagggatgatgccaagcctctgctgagactgaagggcttccctagcttcccactggtggaaaggcaggctaatgaagtggattggtgggacatggtctgcaatgtgaagaaactgatcaatgagaagaaagaggatggcaaggttttctggcagaacctggctggctacaagaggcaagaagccctgaggccttacctgtcctctgaggaagataggaagaaggggaagaagtttgccagataccagctgggagatctgctgctgcacctggaaaagaaacatggggaagattggggcaaagtgtatgatgaggcctgggagagaattgacaagaaggtggaaggcctgagcaagcacattaagctggaagaggaaagaagatctgaggatgcccagagcaaggctgccctgactgattggctgagagccaaggccagctttgtgattgagggcctgaaagaggctgacaaggatgagttctgtagatgtgaactgaagctgcaaaagtggtatggggacctgaggggcaagccctttgccattgaggcagagaacagcatcctggacatcagtggcttcagcaagcagtacaactgtgccttcatttggcagaaggatggggttaagaagctcaacctgtacctgatcatcaactacttcaaaggtggcaagctgaggttcaagaagatcaagccagaggcctttgaggccaacaggttctacacagtgatcaacaaaaagtctggggagattgtgcccatggaagtgaacttcaactttgatgatcccaacctcatcatcctgccactggcctttggcaagagacagggcagagaattcatctggaatgacctgctgagcctggaaacaggcagcctgaaactggccaatggcagagtgattgagaaaaccctgtacaacagaaggaccagacaggatgagcctgcactgtttgtggccctgacctttgagagaagggaagtgctggatagcagcaacatcaagcccatgaacctgattggagtggacagaggggagaatatccctgctgtcattgccctgacagaccctgagggctgtcccctgagcagattcaaggactccctgggcaaccccacacacattctgagaattggggagagctacaaagagaagcagagaaccatccaggccaagaaagaagtggaacagaggagagctggaggctactctaggaagtatgccagcaaagccaagaatctggctgatgacatggtcagaaacacagccagggacctgctgtactatgctgtgacccaggatgccatgctgatctttgagaatctgagcagaggatttgggagacaaggcaagaggaccttcatggctgaaagacagtacaccaggatggaagattggctgactgccaaactggcctatgagggactgcccagcaagacctacctgtccaagacactggcccagtatacctccaagacctgcagcaattgtggcttcaccatcacctctgcagactatgacagagtgctggaaaagctcaagaaaacagccacaggctggatgaccaccatcaatgggaaagagctgaaggttgagggccagatcacctactacaacagatacaaaaggcagaatgtggttaaggacctgtctgtggaactggacagactgtctgaggaatctgtgaacaatgacatcagcagctggaccaagggcagatctggggaagctctgagcctgctgaagaagagattcagccacagacctgtgcaagagaagtttgtgtgtctgaactgtggctttgagacacatgctgatgaacaggctgctctgaacattgccagaagctggctgttcctgagaagccaagagtacaagaagtaccagaccaacaagaccacaggcaacactgacaagagggcctttgtggaaacctggcagagcttctacagaaagaaactcaaagaagtctggaagcctgctgtg

SEQ ID NO: 4027 - DNA, 2934 bp, synthetic construct
  source 1..2934: mol_type = other DNA
caagagatcaagaggatcaacaagattagaagaaggctggtcaaggacagcaacaccaagaaggcaggcaagacaggccccatgaagaccctgcttgtcagagtgatgacccctgacctgagagagagactggaaaacctgagaaagaagcctgagaacatccctcagcctatctccaacaccagcagagccaacctgaacaagctgctgacagactacacagagatgaagaaagccatcctgcatgtgtactgggaagagttccagaaagaccctgtgggcctgatgagcagagtggcccagcctgccagcaagaagattgaccagaacaaactgaagccagagatggatgagaagggcaacctgaccacagctggctttgcctgctctcagtgtggccagcctctgtttgtgtacaagctggaacaagtgtctgagaaaggcaaggcctacaccaactactttggcagatgcaatgtggctgagcatgagaagctgatcaagctggcccagctgaagcctgaaaaggactctgatgaggctgtgacctacagcctgggcaagtttggacagagagccctggacttctacagcatccatgtgaccaaagaaagcacacaccctgtgaagcccctggctcagattgctggcaacagatatgcctctagccctgtgggcaaagccctgtctgatgcctgcatgggaaccattgccagctttctgagcaagtaccaggacatcatcattgagcaccagaaagtggtcaaggggaaccagaagaggctggaatctctgagagagctggctggcaaagagaacctggaatacccctctgtgaccctgcctcctcagcctcacaccaaagagggtgttgatgcctacaatgaagtgattgccagagtcaggatgtgggtcaacctgaatctgtggcagaagctgaagctgagcagggatgatgccaagcctctgctgagactgaagggcttccctagcttcccactggtggaaaggcaggctaatgaagtggattggtgggacatggtctgcaatgtgaagaaactgatcaatgagaagaaagaggatggcaaggttttctggcagaacctggctggctacaagaggcaagaagccctgaggccttacctgtcctctgaggaagataggaagaaggggaagaagtttgccagataccagctgggagatctgctgctgcacctggaaaagaaacatggggaagattggggcaaagtgtatgatgaggcctgggagagaattgacaagaaggtggaaggcctgagcaagcacattaagctggaagaggaaagaagatctgaggatgcccagagcaaggctgccctgactgattggctgagagccaaggccagctttgtgattgagggcctgaaagaggctgacaaggatgagttctgtagatgtgaactgaagctgcaaaagtggtatggggacctgaggggcaagccctttgccattgaggcagagaacagcatcctggacatcagtggcttcagcaagcagtacaactgtgccttcatttggcagaaggatggggttaagaagctcaacctgtacctgatcatcaactacttcaaaggtggcaagctgaggttcaagaagatcaagccagaggcctttgaggccaacaggttctacacagtgatcaacaaaaagtctggggagattgtgcccatggaagtgaacttcaactttgatgatcccaacctcatcatcctgccactggcctttggcaagagacagggcagagaattcatctggaatgacctgctgagcctggaaacaggcagcctgaaactggccaatggcagagtgattgagaaaaccctgtacaacagaaggaccagacaggatgagcctgcactgtttgtggccctgacctttgagagaagggaagtgctggatagcagcaacatcaagcccatgaacctgattggagtggacagaggggagaatatccctgctgtcattgccctgacagaccctgagggctgtcccctgagcagattcaaggactccctgggcaaccccacacacattctgagaattggggagagctacaaagagaagcagagaaccatccaggccaagaaagaagtggaacagaggagagctggaggctactctaggaagtatgccagcaaagccaagaatctggctgatgacatggtcagaaacacagccagggacctgctgtactatgctgtgacccaggatgccatgctgatctttgagaatctgagcagaggatttgggagacaaggcaagaggaccttcatggctgaaagacagtacaccaggatggaagattggctgactgccaaactggcctatgagggactgcccagcaagacctacctgtccaagacactggcccagtatacctccaagacctgcagcaattgtggcttcaccatcacctctgcagactatgacagagtgctggaaaagctcaagaaaacagccacaggctggatgaccaccatcaatgggaaagagctgaaggttgagggccagatcacctactacaacagatacaaaaggcagaatgtggttaaggacctgtctgtggaactggacagactgtctgaggaatctgtgaacaatgacatcagcagctggaccaagggcagatctggggaagctctgagcctgctgaagaagagattcagccacagacctgtgcaagagaagtttgtgtgtctgaactgtggctttgagacacatgctgatgaacaggctgctctgaacattgccagaagctggctgttcctgagaagccaagagtacaagaagtaccagaccaacaagaccacaggcaacactgacaagagggcctttgtggaaacctggcagagcttctacagaaagaaactcaaagaagtctggaagcctgctgtg

SEQ ID NO: 4028 - DNA, 89 bp, synthetic construct
  source 1..89: mol_type = other DNA
actggcgcttctatctgattactctgagcgccatcaccagcgactatgtcgtagtgggtaaagctccctcttcggagggagcatcagag

SEQ ID NO: 4029 - DNA, 99 bp, synthetic construct
  source 1..99: mol_type = other DNA
actgggccttctatctgattactctgaggcccatcaccagcgactatgtcgtagtgggtaaagccgcttagggacttcggtccctaagaggcatcagag

SEQ ID NO: 4030 - DNA, 97 bp, synthetic construct
  source 1..97: mol_type = other DNA
actgggccttctatctgattactctgaggcccatcaccagcgactatgtcgtagtgggtaaagcccttagggacttcggtccctaagggcatcagag

SEQ ID NO: 4031 - DNA, 99 bp, synthetic construct
  source 1..99: mol_type = other DNA
actgggccttctatctgattactctgaggcccatcaccagcgactatgtcgtagtgggtaaagcctcttagggacttcggtccctaagaggcatcagag

SEQ ID NO: 4032 - DNA, 89 bp, synthetic construct
  source 1..89: mol_type = other DNA
actgggccttctatctgattactctgaggcccatcaccagcgactatgtcgtagtgggtaaagctccctcttcggagggagcatcagag

SEQ ID NO: 4033 - DNA, 97 bp, synthetic construct
  source 1..97: mol_type = other DNA
actgggccttctatctgattactctgaggcccatcaccagcgactatgtcgtagtgggtaaagcccttagggaccttggtccctaagggcatcagag

SEQ ID NO: 4034 - DNA, 99 bp, synthetic construct
  source 1..99: mol_type = other DNA
actgggccttctatctgattactctgaggcccatcaccagcgactatgtcgtagtgggtaaagcctcttagggaccttggtccctaagaggcatcagag

SEQ ID NO: 4035 - DNA, 89 bp, synthetic construct
  source 1..89: mol_type = other DNA
actgggccttctatctgattactctgaggcccatcaccagcgactatgtcgtagtgggtaaagctccctccttggagggagcatcagag

SEQ ID NO: 4036 - DNA, 97 bp, synthetic construct
  source 1..97: mol_type = other DNA
actgggccttctatctgattactctgaggcccatcaccagcgactatgtcgtagtgggtaaagcccttagggaggaaactccctaagggcatcagag

SEQ ID NO: 4037 - DNA, 99 bp, synthetic construct
  source 1..99: mol_type = other DNA
actgggccttctatctgattactctgaggcccatcaccagcgactatgtcgtagtgggtaaagcctcttagggaggaaactccctaagaggcatcagag

SEQ ID NO: 4038 - DNA, 89 bp, synthetic construct
  source 1..89: mol_type = other DNA
actgggccttctatctgattactctgaggcccatcaccagcgactatgtcgtagtgggtaaagctccctggaaacagggagcatcagag

SEQ ID NO: 4039 - DNA, 98 bp, synthetic construct
  source 1..98: mol_type = other DNA
actgggccttctatctgattactctgaggcccatcaccagcgactatgtcgtagtgggtaaagcccttagggacttcaggtccctaagggcatcagag

SEQ ID NO: 4040 - DNA, 100 bp, synthetic construct
  source 1..100: mol_type = other DNA
actgggccttctatctgattactctgaggcccatcaccagcgactatgtcgtagtgggtaaagcctcttagggacttcaggtccctaagaggcatcagag

SEQ ID NO: 4041 - DNA, 90 bp, synthetic construct
  source 1..90: mol_type = other DNA
actgggccttctatctgattactctgaggcccatcaccagcgactatgtcgtagtgggtaaagctccctcttcaggagggagcatcagag

SEQ ID NO: 4042 - DNA, 97 bp, synthetic construct
  source 1..97: mol_type = other DNA
actgggccttctatctgattactctgaggcccatcaccaggcactatgtgctagtgggtaaagcccttagggaccttggtccctaagggcatcagag

SEQ ID NO: 4043 - DNA, 99 bp, synthetic construct
  source 1..99: mol_type = other DNA
actgggccttctatctgattactctgaggcccatcaccaggcactatgtgctagtgggtaaagcctcttagggaccttggtccctaagaggcatcagag

SEQ ID NO: 4044 - DNA, 89 bp, synthetic construct
  source 1..89: mol_type = other DNA
actgggccttctatctgattactctgaggcccatcaccaggcactatgtgctagtgggtaaagctccctccttggagggagcatcagag

SEQ ID NO: 4045 - DNA, 97 bp, synthetic construct
  source 1..97: mol_type = other DNA
actgggccttctatctgattactctgaggcccatcaccaggcactatgtgctagtgggtaaagcccttagggaggaaactccctaagggcatcagag

SEQ ID NO: 4046 - DNA, 99 bp, synthetic construct
  source 1..99: mol_type = other DNA
actgggccttctatctgattactctgaggcccatcaccaggcactatgtgctagtgggtaaagcctcttagggaggaaactccctaagaggcatcagag

SEQ ID NO: 4047 - DNA, 89 bp, synthetic construct
  source 1..89: mol_type = other DNA
actgggccttctatctgattactctgaggcccatcaccaggcactatgtgctagtgggtaaagctccctggaaacagggagcatcagag

SEQ ID NO: 4048 - DNA, 98 bp, synthetic construct
  source 1..98: mol_type = other DNA
actgggccttctatctgattactctgaggcccatcaccaggcactatgtgctagtgggtaaagcccttagggacttcaggtccctaagggcatcagag

SEQ ID NO: 4049 - DNA, 100 bp, synthetic construct
  source 1..100: mol_type = other DNA
actgggccttctatctgattactctgaggcccatcaccaggcactatgtgctagtgggtaaagcctcttagggacttcaggtccctaagaggcatcagag

SEQ ID NO: 4050 - DNA, 90 bp, synthetic construct
  source 1..90: mol_type = other DNA
actgggccttctatctgattactctgaggcccatcaccaggcactatgtgctagtgggtaaagctccctcttcaggagggagcatcagag

SEQ ID NO: 4051 - DNA, 450 bp, synthetic construct
  source 1..450: mol_type = other DNA
ctagactagcatgctgcccatgtaaggaggggacacccgagatgcctggttataattaacccagacatgtggctgccccccacctgctgcctctaaaaataaccctgcatgccatgttcccggcgaagggcccgccagctagactcagcacttagtttaggaaccagtgagcaagtcagcgcccatacaaggccatggggctgggcaagctgcacgcctgggtccggggtcccgggcaacgagctgaaagcaaggcctggccccccccaaccagctgtccccttggggcagggcacggtgctcatctgctctcaggggcccctccctggggacagcccctcctggctagtcacaccctgtaggctcctctatataacccaggggcacaggggctgccctcattctaccaccacctccacagcacagacagacactcaggagccagccagc

SEQ ID NO: 4052 - DNA, 776 bp, synthetic construct
  source 1..776: mol_type = other DNA
ggcgttctagaagctgcatgtctaagctagacccttcagattaaaaataactgaggtaagggcctgggtaggggaggtggtgtgagacgctcctgtctctcctctatctgcccatcggccctttggggaggaggaatgtgcccaaggactaaaaaaaggccatggagccagaggggcgagggcaacagacctttcatgggcaaaccttggggccctgctgtctagcatgccccactacgggtctaggctgcccatgtaaggaggcaaggcctggggacacccgagatgcctggttataattaacccagacatgtggctgcccccccccccccaacacctgctgcctctaaaaataaccctgtccctggtggatcccctgcatgcgaagatcttcgaacaaggctgtgggggactgagggcaggctgtaacaggcttgggggccagggcttatacgtgcctgggactcccaaagtattactgttccatgttcccggcgaagggccagctgtcccccgccagctagactcagcacttagtttaggaaccagtgagcaagtcagcccttggggcagcccatacaaggccatggggctgggcaagctgcacgcctgggtccggggtgggcacggtgcccgggcaacgagctgaaagctcatctgctctcaggggcccctccctggggacagcccctcctggctagtcacaccctgtaggctcctctatataacccaggggcacaggggctgccctcattctaccaccacctccacagcac

SEQ ID NO: 4053 - DNA, 724 bp, synthetic construct
  source 1..724: mol_type = other DNA
cacccatgcctcctcaggtaccccctgccccccacagctcctctcctgtgccttgtttcccagccatgcgttctcctctataaatacccgctctggtatttggggttggcagctgttgctgccagggagatggttgggttgacatgcggctcctgacaaaacacaaacccctggtgtgtgtgggcgtgggtggtgtgagtagggggatgaatcagggagggggcgggggacccagggggcaggagccacacaaagtctgtgcgggggtgggagcgcacatagcaattggaaactgaaagcttatcagaccctttctggaaatcagcccactgtttataaacttgaggccccaccctcgagataaccagggctgaaagaggcccgcctgggggctgcagacatgcttgctgcctgccctggcgaaggattggcaggcttgcccgtcacaggacccccgctggctgactcaggggcgcaggcctcttgcgggggagctggcctccccgcccccacggccacgggccgccctttcctggcaggacagcgggatcttgcagctgtcaggggaggggaggcgggggctgatgtcaggagggatacaaatagtgccgacggctgggggccctgtctcccctcgccgcatccactctccggccggccgcctgcccgccgcctcctccgtgcgcccgccagcctcgcccgcgccgtcaccctctggctaact

SEQ ID NO: 4054 - DNA, 742 bp, synthetic construct
  source 1..742: mol_type = other DNA
tcgagcgttacccttcagattaaaaataactgaggtaagggcctgggtaggggaggtggtgtgagacgctcctgtctctcctctatctgcccatcggccctttggggaggaggaatgtgcccaaggactaaaaaaaggccatggagccagaggggcgagggcaacagacctttcatgggcaaaccttggggccctgctgtctagcatgccccactacgggtctaggctgcccatgtaaggaggcaaggcctggggacacccgagatgcctggttataattaacccagacatgtggctgcccccccccccccaacacctgctgcctctaaaaataaccctgtccctggtggatcccctgcatgcgaagatcttcgaacaaggctgtgggggactgagggcaggctgtaacaggcttgggggccagggcttatacgtgcctgggactcccaaagtattactgttccatgttcccggcgaagggccagctgtcccccgccagctagactcagcacttagtttaggaaccagtgagcaagtcagcccttggggcagcccatacaaggccatggggctgggcaagctgcacgcctgggtccggggtgggcacggtgcccgggcaacgagctgaaagctcatctgctctcaggggcccctccctggggacagcccctcctggctagtcacaccctgtaggctcctctatataacccaggggcacaggggctgcccctctggctaacta

SEQ ID NO: 4055 - DNA, 579 bp, synthetic construct
  source 1..579: mol_type = other DNA
tggttgctgactaattgagatgcatgctttgcatacttctgcctgctggggagcctggggactttccacaccgggagttatttttagagcgatatggcgacggcccttggcagtacatcaattggaaagtcccgttagtgctattggctggccagccaatagctggttgctgactaattgagatgcatgctttgcatacttctgcctgctggggagcctggggactttccacaccgtgaggaatggtgccaggcatatcgggtttgatgtactgccaagccagccaatagccgctctaaaaataactcccccgtcgccatatttgggtgtccgctctaaaaataactcccggccgtcgccatatgggcccctccctggggacagccccttggaaagtcccgttagtgccaggcgggccatttaccgtgggagttatttttagagcgtagggaaacctgaagccccccattgacgtcaatgggcaggttttttatatagtccggcttcaggtttccctacaaggcctggggacaacccgatatgcctggcaggttttttatatagtccaccaagtcagca

SEQ ID NO: 4056 - DNA, 358 bp, synthetic construct
  source 1..358: mol_type = other DNA
caccgcggtggcggccgtccgccctcggcaccatcctcacgacacccaaatatggcgacgggtgaggaatggtggggagttatttttagagcggtgaggaaggtgggcaggcagcaggtgttggcgctctaaaaataactcccgggagttatttttagagcggaggaatggtggacacccaaatatggcgacggttcctcacccgtcgccatatttgggtgtccgccctcggccggggccgcattcctgggggccgggcggtgctcccgcccgcctcgataaaaggctccggggccggcggcggcccacgagctacccggaggagcgggaggcgccaagctctagaactagtggatct

SEQ ID NO: 4057 - DNA, 495 bp, synthetic construct
  source 1..495: mol_type = other DNA
ctcactccccgcccaggcagcaaggagcccacaccctcatgcccctcagcttcagcccccacctccaggaggccctacccacgctcatgaccttgctattctgggccttgtgtcctgtagggagatggacaggagacagctgggcttccaggccacccaggcggggggctagccgagggaagcctgctggctctcctgcttgctctaatttctggggctccccaaaccttggcctcaggagactggggataggaccggccttgaaagtgggggaagctttggagagccgggtgctgggttcttagtgagatggccagtgaaggctgtggtgccccgaggtaagcagggcctgatcccctcctaatcttccagcagcaactggtgctctgaggctccccctcccccagccctgccagccttcagggacctgccttccaaagatgggcaggggagggggacgaggacacccacccactcctcagaccagcatgtctt

SEQ ID NO: 4058 - DNA, 344 bp, synthetic construct
  source 1..344: mol_type = other DNA
ccctccagatgggtttcctggaatctagatttcccaggttccaaaggacacccgagtctcatgcctggaactcagtgagactaattcacctctcctctgccctaatcttcatctccagccagaagccaacagatcccaggggactggagccacaggggctgcacctgtttaccgggtatttttaggatggttgatgaacacataatacccaccctatagtcagagaaagacaatgcctgctatgttaatcctgtggctattatagtctgtcatctcatgggttggggcaggacactgaccctctcagaggccagagagaggcctcgcaagcaggaggttaggga

SEQ ID NO: 4059 - DNA, 429 bp, synthetic construct
  source 1..429: mol_type = other DNA
atggagacaatccatgaattcctgagatgcttggctggtattagattttatgggcagctgcttattcttagggctctgcttctccaaagacactgaggaagtccaaaggaacaccagctggcgaagagccacctccaggcccatctgtccatcatcagcctccaggaatgccagtgtccagagggcaccaggtctgcgtctgtctccctgggatgtgccttgtccttggtgggcatttggcagtgatcatgcctccctgtctccctcagagatccaactgtccccattgtggggccctaccttccaaggccggtttacacctcctgccaagctccggggcctgcccccagcctgcctcactgacaaatgccagaccaaggggtcccacgtcaggcaagaggcctcagcctgtgctctgacacccctcag

SEQ ID NO: 4060 - DNA, 434 bp, synthetic construct
  source 1..434: mol_type = other DNA
ttctgagtcctctaaggtccctcactcccaactcagccccatgtcctgtcaattcccactcagtgtctgatctccttctcctcacctttcccatctcccgtttgacccagcttcctgagctctcctcccattcccctttttggagtcctcctcctctcccagaacccagtaataagtgggctcctccctggcctggacccccgtggtaaccctataaggcgaggcagctgctgtctgaggcagggaggggctggtgtgggaggctaagggcagctgctaagtttagggtggctccttctctcttcttagagacaacaggtggctggggcctcagtgcccagaaaagaaaatgtcttagaggtatcggcatgggcctggaggaggggggacagggcagggggaggcatcttcctcaggacatcgggtcctagagg

SEQ ID NO: 4061 - DNA, 171 bp, synthetic construct
  source 1..171: mol_type = other DNA
ctctaaggtccctcactcccaactcagccccatgtcctgtcaattcccactcagtgtctgatctccttctcctcacctttcccatctcccgtttgacccaagcttcctgagctctcctcccattcccctttttggagtcctcctcctctcccagaacccagtaataagtgg

SEQ ID NO: 4062 - DNA, 51 bp, synthetic construct
  source 1..51: mol_type = other DNA
tggcctggacccccgtggtaaccctataaggcgaggcagctgctgtctgag

SEQ ID NO: 4063 - DNA, 60 bp, synthetic construct
  source 1..60: mol_type = other DNA
gcagggaggggctggtgtgggaggctaagggcagctgctaagtttagggtggctccttct

SEQ ID NO: 4064 - DNA, 41 bp, synthetic construct
  source 1..41: mol_type = other DNA
aggaggggggacagggcagggggaggcatcttcctcaggac

SEQ ID NO: 4065 - DNA, 120 bp, synthetic construct
  source 1..120: mol_type = other DNA
gcagggaggggctggtgtgggaggctaagggcagctgctaagtttagggtggctccttctctcttcttagagacaacaggtggctggggcctcagtgcccagaaaagaaaatgtcttaga

SEQ ID NO: 4066 - DNA, 474 bp, synthetic construct
  source 1..474: mol_type = other DNA
gactaggaataaatcacatatcctcaatccctggacaacttgtttacttctagtgttagttttttcttaaaaaaaaaattgaaatcattctgaggctggaatactttggacatgcccagcagttcctggcagttcccacagaagcattacctcatgactggagtgggtaaagcatactgtgggctatggataagactgacattaaccacaagcatgtttggcagcagactggtgctttacaagctccatgttcagcaggagctgcaaagtgttcctccaaaccaatatttgtcattcttggattctatttaggaggtcctgttactcacatgtttcaatatcagcagaagccagtttccctgtggtaccgaagtggatcctgatgaatttacccttgtaagtaaaaaaaatgatgttatacccaaagcttgaagtacgtagtggggatgccactgaaataattcagacatgctt

SEQ ID NO: 4067 - DNA, 519 bp, synthetic construct
  source 1..519: mol_type = other DNA
gtgctcatagctccaccttttgttcctaatatggtctttccagctccctccaccccatcattgttctcctgggggaacacagggtgagacgctttgatgaactgacatcaccagcaaaaaaaatatctagcaacagctgaggctgattttagacaatggaaagtgggggagggaagaggttctccctgaccctgaaactttccactcattctgggcagctctatggatgttttaaaagaagaggaagaggggagggaagaacattgaaatagagaagtgtactttggcaattctaggttggcagtttgcatccagggggtcctggttgcctttcagcttcccgtttcactctcccccagactgtgttgaatgctggtcaaactccgttagttgagttttagcttttgattcctggtattcaaggagcttgggcacagggaagaggggaggtcactcatgatccttaacaattctcccagatccccagatcaaattgctgtgctattctgggagtctccg

SEQ ID NO: 4068 - DNA, 372 bp, synthetic construct
  source 1..372: mol_type = other DNA
atcgtgtgtcagaggtttgtgtcagcttcccagcaagggaaccagaaaggaaaaggaaccggttcctcatgcttcctaggggaatgcatgcatatctgaagagaagggaatcttatataaggctgtttagctaagggcagccaccagccaggtgagccttacagaagcacagggctgggtgtctgcagttccctagcagattaacctgggtcacagtgactcagagctccagcatgcgagttccaggtgtggaactgagcaagtacagatctgcttttgctccacttgggagtatttttccttcttagtgagcatgggcagcctcctggccagggaagtctggcactgtctgggcctgacagggaaaccctg

SEQ ID NO: 4069 - DNA, 256 bp, synthetic construct
  source 1..256: mol_type = other DNA
ccacagcagttgggggcatttatgggccttcctataaacttctgagagggtaactttatcctgcttctttcagccaagtatcctcctccagcagctggtcacaaagctggttaatctcccagagtgctcagcttaaaacccgtgactcacagcacagccagtgtgggggagggggtggctgcctccaatacgtggcgcccagagtcagctgttctggggccttctctggtttctccaactgagtcctgaggtttgg

SEQ ID NO: 4070 - DNA, 206 bp, synthetic construct
  source 1..206: mol_type = other DNA
ctttactccttttagacttctagttcacagggtccctctggaagtcacgagttcttgatggacttaatttcagaaattaaactcactttctgattacaactccctctccttgtaattcccatgtgctcactccctcttcaagctgagggagactcctagacccctgattcctgaattttttctttcttttttgttttttctttttt

SEQ ID NO: 4071 - DNA, 255 bp, synthetic construct
  source 1..255: mol_type = other DNA
tattattaattgttttttgcttttggttttctccagcaactttactctgatgtctaggtataattttctttatatttttctgggcttttattgaacctgtgctttaagtcttttgtcagttttagaccatttcttgaccattatgtcctaaaacattgcttctgtcccattcttcctcacttgtccttatgggacacaaattatacattttttggaccattatattttttaacatcatttttttgtttgttttcc

SEQ ID NO: 4072 - DNA, 277 bp, synthetic construct
  source 1..277: mol_type = other DNA
gtaaaaaacaggggccctggagagggactgtgggcaatgcccccgagtccccggggcctgggaagaacagaggctgccaagtgcagggggtggtggggaggggaagaccctggagtaacaatccctgctgtgtccacttggttcccacggactcaagccaagccaaagcactgcccggaccagtcctggtgctggcctcagactcctcctttctttctcagaaccccattcccctcggcttccaaccaattcagggcccccagagtccaggccccta

SEQ ID NO: 4073 - DNA, 660 bp, synthetic construct
  source 1..660: mol_type = other DNA
ggctctgtgagctaaatcgggcagcagctgtcaccaccagggggtgtgggacagctgtccccctccccccgcacctgccctgcgcctgcctcttgaccacagcccctccctctccctttctgcagcctgggggtgtggagaggccactggcatctgtgcggggcgccccagccccctcagctctgggacaggcctggccgggtgccctggggcaagcggtagccctctgagtcctgaggcgctcccctgggaagagcagtcccagcgggtgggggcacaggcgctctgcactgtgaggggcagacagtaagtgcttagttgatgcaatgacctggtctgtcctgcccgctctcacctgccagaatatgggggttggggcaggagggagtgggagcaggaggaggtcagctggcccctctccccccacccccagcgcccccagctcctcctcccggggctcctcactccggaccttatttggccatagcccaggacgcacctgggggccacagccccgcctgccactcaggcccaagaatagcaacactcaggcccccgccagtctgtctgggacctgcgatgggacaggcgacaggcacagggtggcagggaggggcccaggggcactgagagaaggggagagacacagacagaggggag

SEQ ID NO: 4074 - DNA, 221 bp, synthetic construct
  source 1..221: mol_type = other DNA
tgacggggctggcaacgccccccacagcggcacaggcggataaaccctctggggagggagttcagtcccagcgggaggggcccttcccacccgggagctcgccccaaaccgggtggagagggggtggggggggggtgcagatcgcggcgcctccctgccctctggccctgctgagactccaccgcccaccccacctcccggtagcagaaggggcagaagca

SEQ ID NO: 4075 - DNA, 310 bp, synthetic construct
  source 1..310: mol_type = other DNA
caggtgaggcttgttaaagcagacttaaataagatccagggccttataacataataccaaaaacgttcaggataccacaaaaaaaaaaatcactcataccaaaaccagaaaaatttcaacttgagtaagaaaagagaatcaacagatgccaaacccaggatgacacagatgttagaattatctgaaaagaattttaagtagctatcataaaattacctcagtgagtaattatgaacatgcttgtaataaatgaaaaatatattttggaactgatgaatacaataaccaaaataaaaacttaatggatgta

SEQ ID NO: 4076 - DNA, 218 bp, synthetic construct
  source 1..218: mol_type = other DNA
tggaagctttcctaacagatgggtttttatagctgctacagcctggcctctatgttagtctttcacctcagggactttctacagctcattactcacccttattcatggcagtctaaggattctggttttatttattttttttggtggggttgggggtgaggggagagataaatctgtttttgattgatcacagtttcatgtaggccaattgcctcttg

SEQ ID NO: 4077 - DNA, 353 bp, synthetic construct
  source 1..353: mol_type = other DNA
ctgagttgggtggggatttggagaagttttatgtccagctggagaattgtatatgcaccaatcagcactctgtgtctagctcagggttcgtggatacaccaatcagcactctgtatctagcctggtggggacttgcagaacttttatttctagctaggggattgtaaatgcaccaatcagcactctgtgtctagctcagggattgtaaatgcaccaatcagcactctgtcaaaacaggccaatcagctctctgtaaaatggaccaatcagctctctgtaaaatggaccaatcagcagcatgtgggtggggccagataaaggaataaaagcaggctgcccaagccagcagaggc

SEQ ID NO: 4078 - DNA, 50 bp, synthetic construct
  source 1..50: mol_type = other DNA
gactgctctgtaggttttggtttacccacccctcctctgtagtaattcac

SEQ ID NO: 4079 - DNA, 395 bp, synthetic construct
  source 1..395: mol_type = other DNA
gcaggttgtgtctgttgacgcaggcagcctgcttttattctcttatctggccccacccacatcctgctgattggtccattttacagagagccgattggtctgttttacagagcgctgattggtccgttttgacagggtgctgattggtgtgtttacaatccctgagctcaagacaaaagttctccacctccccactagattagctagatacagagtgctgactggtgtatttacaaaccctgagctagacacagagtgctgattggtgcatttacaaaccttgagctagatacagagtgtccattggtgtattcacaatcccttagctagacataaagattctccaagttcccaccagactcaggagcccagctagcttcacccagtggatcccg

SEQ ID NO: 4080 - DNA, 382 bp, synthetic construct
  source 1..382: mol_type = other DNA
agctgaagggttttgtcccagcctctgtggccttctatagctggaggagctgggtctgggctctagggggggtgggggttgttctccaccctcgggctggcccccagccgctgagccacaccggttcccccatgccggatgccgcaggggtgaagactctgctctctggggtgggaggctctctgcgatcctggagcgtctgtaggccaacgagagggacagagtgtggcccaaagggttgggcagggtctgtcaggagcccggtcagtgtcaggggaggggcagtgtctggcaccgctggctgccatgctccacccccgcgccacggccttggtgcctgctgctctccctgaccctttcctaaacccaaacagagcatctg

SEQ ID NO: 4081 - DNA, 135 bp, synthetic construct
  source 1..135: mol_type = other DNA
tcaaaaaggacaatgccgggaacaagcagcttcatcagagcagtgagaggcaactggggcggaagcagctgcgtattggagaggaggacgacagcaagattcatcttgcttgggaaacaggctattaatatccca

SEQ ID NO: 4082 - DNA, 326 bp, synthetic construct
  source 1..326: mol_type = other DNA
tgacaacctagggtggggacaagggctctgatgaggggatgagggcacgtgggcagctgtgggggtccgaggaggggatacgcagtctgtggccttgcttaaggaggagcagagacagctgggctccagaattcaagcacttgaccaaccatcatgctgccctcaaaccatgtctcctgtcccagaaacaggtgagggagcagtgaggcctgctcgacagctgggcccgggactctgctccgaaacatgcctgttgctttcttctctctggctacagtttatttcatcctcactcaaggaagccctggtctccgggagaaaggcca

SEQ ID NO: 4083 - DNA, 273 bp, synthetic construct
  source 1..273: mol_type = other DNA
gtctcggagaacttggctggcggtggaacagctgttgcctccactgatcccagagtcagctgtcttcccaatgaggaagccacccttgcagacttaggaacaccaagctgctgctgccagtgccacctaccccagtaaatctggggcctgtgtccagccgtcccccttgagttgaaatccagctcaaatgcatttgattggtggaattgaagttattatcacttatgcatgctggcagaactttcattacccgcatgatttacttacacccta

SEQ ID NO: 4084 - DNA, 148 bp, synthetic construct
  source 1..148: mol_type = other DNA
tgatcaggccacggcggcttctgctggccctgagaacgccctgcctggggctgggtcgggtctgtttggcagcattgcccagattgcaactcatgtgtccttgaacaaagtcaatgtgtttttcctctccagagcccagcaactattt

SEQ ID NO: 4085 - DNA, 80 bp, synthetic construct
  source 1..80: mol_type = other DNA
ggaaaacgctcaaggcgctggtgggccgggactggggggcacggagcccccttgtgccacccagagagcaggacctgcag

SEQ ID NO: 4086 - DNA, 437 bp, synthetic construct
  source 1..437: mol_type = other DNA
aaccggcccctggtgctccaggcaggagtggagcagtccccctctgctgggcctgtggggagtggtggggggaggaagcagccagtaaacagccacaggcctcgcggcacctgctgtcccctccgcacagccgctgacctccctcgcacagggcgccctgctcctcctggccacccgcctgtccggaggctgatggctgggcacacgtgtggccacagctgtgggggccatcaacaccgcctggctgcagggccggtggccagtccctggtgacaaccaaagaaggtgaatgtggcagggtgttcctgtggtgggggtgttcccggctgggggggggggcgttcctgggggggcattcctggggggggcgttcctggtgggggcagcccttccagaccaggctgcccttgggccagcgtgggttgggcatgcccaga

SEQ ID NO: 4087 - DNA, 297 bp, synthetic construct
  source 1..297: mol_type = other DNA
tggtctggtgactgccctgaatgaccagtagcctccttgactcccaaccgactcggaatgcaggaggtcccccaccaactgcccacgtgaccgttggactttgaatcagattcaccttcaactgaccaaaccgggctgctgggcagtgcagattctttcaatgaaaaagcggcctgctgggctggggcttgggcagcgtagggagtgaagccggcaagctgccagggtctcagtgcctcctcttgatcacagcagctgccccagcagtctggactcaggcctggctgagaagaggca

SEQ ID NO: 4088 - RNA, 20 nt, synthetic construct
  source 1..20: mol_type = other RNA
aaggggctccgcaccacgcc

SEQ ID NO: 4089 - RNA, 20 nt, synthetic construct
  source 1..20: mol_type = other RNA
tgtggtcggggtagcggctg

SEQ ID NO: 4090 - DNA, 825 bp, synthetic construct; identical to SEQ ID NO: 835
  source 1..825: mol_type = other DNA

SEQ ID NO: 4091 - DNA, 805 bp, synthetic construct
  source 1..805: mol_type = other DNA
cctcatggagctcctcctgtcagaggagtgtggggactggatgactccagaggtaacttgtgggggaacgaacaggtaaggggctgtgtgacgagatgagagactgggagaataaaccagaaagtctctagctgtccagaggacatagcacagaggcccatggtccctatttcaaacccaggccaccagactgagctgggaccttgggacagacaagtcatgcagaagttaggggaccttctcctcccttttcctggatcctgagtacctctcctccctgacctcaggcttcctcctagtgtcaccttggcccctcttagaagccaattaggccctcagtttctgcagcggggattaatatgattatgaacacccccaatctcccagatgctgattcagccaggagcttaggagggggaggtcactttataagggtctgggggggtcagaacccagagtcatccagctggagccctgagtggctgagctcaggccttcgcagcattcttgggtgggagcagccacgggtcagccacaaccacgttctgcttcactctccccatctccccccccctccccacccccaattttgtatttatttattttttaattattttgtgcagcgatgggggcggggggggggggggggcgcgcgccaggcggggcggggcggggcgaggggcggggcggggcgaggcggagaggtgcggcggcagccaatcagagcggcgcgctccgaaagtttccttttatggcgaggcggcggcggcggcggccctataaaaagcgaagcgcgcggcgggcg

SEQ ID NO: 4092 - DNA, 1022 bp, synthetic construct
  source 1..1022: mol_type = other DNA
agatcttccccacctagccacctggcaaactgctccttctctcaaaggcccaaacatggcctcccagactgcaacccccaggcagtcaggccctgtctccacaacctcacagccaccctggacggaatctgcttcttcccacatttgagtcctcctcagcccctgagctcctctgggcagggctgtttctttccatctttgtattcccaggggcctgcaaataaatgtttaatgaacgaacaagagagtgaattccaattccatgcaacaaggattgggctcctgggccctaggctatgtgtctggcaccagaaacggaagctgcaggttgcagcccctgccctcatggagctcctcctgtcagaggagtgtggggactggatgactccagaggtaacttgtgggggaacgaacaggtaaggggctgtgtgacgagatgagagactgggagaataaaccagaaagtctctagctgtccagaggacatagcacagaggcccatggtccctatttcaaacccaggccaccagactgagctgggaccttgggacagacaagtcatgcagaagttaggggaccttctcctcccttttcctggatcctgagtacctctcctccctgacctcaggcttcctcctagtgtcaccttggcccctcttagaagccaattaggccctcagtttctgcagcggggattaatatgattatgaacacccccaatctcccagatgctgattcagccaggagcttaggagggggaggtcactttataagggtctgggggggtcagaacccagagtcatcccctgaattctgcagatatccatcacactgcgaggaactgaaaaaccagaaagttaactggtaagtttagtctttttgtcttttatttcaggtcccggatccggtggtggtgcaaatcaaagaactgctcctcagtggatgttgcctttacttctaggcctgtacggaagtgttacttctgctctaaaagctgcggaattgtacccgcggccgatcca

SEQ ID NO: 4093 - DNA, 292 bp, synthetic construct
  source 1..292: mol_type = other DNA
gggccccagaagcctggtggttgtttgtccttctcaggggaaaagtgaggcggccccttggaggaaggggccgggcagaatgatctaatcggattccaagcagctcaggggattgtctttttctagcaccttcttgccactcctaagcgtcctccgtgaccccggctgggatttcgcctggtgctgtgtcagccccggtctcccaggggcttcccagtggtccccaggaaccctcgacagggcccggtctctctcgtccagcaagggcagggacgggccacaggccaagggc

SEQ ID NO: 4094 - DNA, 510 bp, synthetic construct
  source 1..510: mol_type = other DNA
gctagcaagatccaagctcagatctcgatcgagttgggccccagaagcctggtggttgtttgtccttctcaggggaaaagtgaggcggccccttggaggaaggggccgggcagaatgatctaatcggattccaagcagctcaggggattgtctttttctagcaccttcttgccactcctaagcgtcctccgtgaccccggctgggatttagcctggtgctgtgtcagccccggtctcccaggggcttcccagtggtccccaggaaccctcgacagggcccggtctctctcgtccagcaagggcagggacgggccacaggccaagggccctcgatcgaggaactgaaaaaccagaaagttaactggtaagtttagtctttttgtcttttatttcaggtcccggatccggtggtggtgcaaatcaaagaactgctcctcagtggatgttgcctttacttctaggcctgtacggaagtgttacttctgctctaaaagctgcggaattgtaccc

SEQ ID NO: 4095 - DNA, 560 bp, synthetic construct
  source 1..560: mol_type = other DNA
gggccccagaagcctggtggttgtttgtccttctcaggggaaaagtgaggcggccccttggaggaaggggccgggcagaatgatctaatcggattccaagcagctcaggggattgtctttttctagcaccttcttgccactcctaagcgtcctccgtgaccccggctgggatttcgcctggtgctgtgtcagccccggtctcccaggggcttcccagtggtccccaggaaccctcgacagggcccggtctctctcgtccagcaagggcagggacgggccacaggccaagggcaccacgttctgcttcactctccccatctccccccccctccccacccccaattttgtatttatttattttttaattattttgtgcagcgatgggggcggggggggggggggggcgcgcgccaggcggggcggggcggggcgaggggcggggcggggcgaggcggagaggtgcggcggcagccaatcagagcggcgcgctccgaaagtttccttttatggcgaggcggcggcggcggcggccctataaaaagcgaagcgcgcggcgggcg

SEQ ID NO: 4096 - RNA, 20 nt, synthetic construct
  source 1..20: mol_type = other RNA
agaagatgggcgggagtctt

SEQ ID NO: 4097 - DNA, 93 bp, synthetic construct
  source 1..93: mol_type = other DNA
tctaatcggattccaagcagctcaggggattgtctttttctagcaccttcttgccactcctaagcgtcctccgtgaccccggctgggatttag

SEQ ID NO: 4098 - DNA, 94 bp, synthetic construct
  source 1..94: mol_type = other DNA
tctcaggggatctaatcggattagcagctaggggattgtctttttctgcaccttctcctaaggtcctccgtgaccccggatttagtgtcagccc

SEQ ID NO: 4099 - DNA, 174 bp, synthetic construct
  source 1..174: mol_type = other DNA
tgtccttctcaggggaaaagtgaggcggccccttggaggaaggggccgggcagaatgatctaatcggattccaagcagctcaggggattgtctttttctagcaccttcttgccactcctaagcgtcctccgtgaccccggctgggatttagcctggtgctgtgtcagccccggg

SEQ ID NO: 4100 - DNA, 199 bp, synthetic construct
  source 1..199: mol_type = other DNA
gggccccagaagcctggtggttgtttgtccttctcaggggaaaagtgaggcggccccttggaggaaggggccgggcagaatgatctaatcggattccaagcagctcaggggattgtctttttctagcaccttcttgccactcctaagcgtcctccgtgaccccggctgggatttagcctggtgctgtgtcagccccggg

SEQ ID NO: 4101 - DNA, 241 bp, synthetic construct
  source 1..241: mol_type = other DNA
gggccccagaagcctggtggttgtttgtccttctcaggggaaaagtgaggcggccccttggaggaaggggccgggcagaatgatctaatcggattccaagcggctcaggggattgtctttttctagcaccttcttgccactcctaagcgtcctccgtgcttcccagtggtccccaggaaccctcgacagggcccggtctctctcgtccagcaagggcagggacgggccacaggccaagggc

SEQ ID NO: 4102 - DNA, 292 bp, synthetic construct; identical to SEQ ID NO: 4093
  source 1..292: mol_type = other DNA

SEQ ID NO: 4103 - DNA, 510 bp, synthetic construct; identical to SEQ ID NO: 4094
  source 1..510: mol_type = other DNA

SEQ ID NO: 4104 - DNA, 15 bp, synthetic construct
  source 1..15: mol_type = other DNA
gaattcctagagctt

SEQ ID NO: 4105 - DNA, 20 bp, synthetic construct
  source 1..20: mol_type = other DNA
agctcgctgatcagcctcga

SEQ ID NO: 4106 - DNA, 20 bp, synthetic construct
  source 1..20: mol_type = other DNA
caagaggagaagcagtttgg

SEQ ID NO: 4107 - DNA, 24 bp, synthetic construct
  source 1..24: mol_type = other DNA
ctcaagaagatgggcgggagtctt

SEQ ID NO: 4108 - DNA, 24 bp, synthetic construct
  source 1..24: mol_type = other DNA
gtcaagaagatgggcgggagtctt

SEQ ID NO: 4109 - DNA, 8156 bp, synthetic construct
  source 1..8156: mol_type = other DNA
gttggccgtctcaatctgctagcgtaacgccagggttttcccagtcacgacgttgtaaaacgacggccagtgagcgcgcgtaatacgactcactatagggcgaattgggtaccgggccccccctcgatcgaggtcgacggtatcgggggagctcgcagggtctccattttgaagcgggaggtttgaacgcgcagccgccatgccggggttttacgagattgtgattaaggtccccagcgaccttgacgagcatctgcccggcatttctgacagctttgtgaactgggtggccgagaaggaatgggagttgccgccagattctgacatggatctgaatctgattgagcaggcacccctgaccgtggccgagaagctgcagcgcgactttctgacggaatggcgccgtgtgagtaaggccccggaggctcttttctttgtgcaatttgagaagggagagagctacttccacatgcacgtgctcgtggaaaccaccggggtgaaatccatggttttgggacgtttcctgagtcagattcgcgaaaaactgattcagagaatttaccgcgggatcgagccgactttgccaaactggttcgcggtcacaaagaccagaaatggcgccggaggcgggaacaaggtggtggatgagtgctacatccccaattacttgctccccaaaacccagcctgagctccagtgggcgtggactaatatggaacagtatttaagcgcctgtttgaatctcacggagcgtaaacggttggtggcgcagcatctgacgcacgtgtcgcagacgcaggagcagaacaaagagaatcagaatcccaattctgatgcgccggtgatcagatcaaaaacttcagccaggtacatggagctggtcgggtggctcgtggacaaggggattacctcggagaagcagtggatccaggaggaccaggcctcatacatctccttcaatgcggcctccaactcgcggtcccaaatcaaggctgccttggacaatgcgggaaagattatgagcctgactaaaaccgcccccgactacctggtgggccagcagcccgtggaggacatttccagcaatcggatttataaaattttggaactaaacgggtacgatccccaatatgcggcttccgtctttctgggatgggccacgaaaaagttcggcaagaggaacaccatctggctgtttgggcctgcaactaccgggaagaccaacatcgcggaggccatagcccacactgtgcccttctacgggtgcgtaaactggaccaatgagaactttcccttcaacgactgtgtcgacaagatggtgatctggtgggaggaggggaagatgaccgccaaggtcgtggagtcggccaaagccattctcggaggaagcaaggtgcgcgtggaccagaaatgcaagtcctcggcccagatagacccgactcccgtgatcgtcacctccaacaccaacatgtgcgccgtgattgacgggaactcaacgaccttcgaacaccagcagccgttgcaagaccggatgttcaaatttgaactcacccgccgtctggatcatgactttgggaaggtcaccaagcaggaagtcaaagactttttccggtgggcaaaggatcacgtggttgaggtggagcatgaattctacgtcaaaaagggtggagccaagaaaagacccgcccccagtgacgcagatataagtgagcccaaacgggtgcgcgagtcagttgcgcagccatcgacgtcagacgcggaagcttcgatcaactacgcagacaggtaccaaaacaaatgttctcgtcacgtgggcatgaatctgatgctgtttccctgcagacaatgcgagagaatgaatcagaattcaaatatctgcttcactcacggacagaaagactgtttagagtgctttcccgtgtcagaatctcaacccgtttctgtcgtcaaaaaggcgtatcagaaactgtgctacattcatcatatcatgggaaaggtgccagacgcttgcactgcctgcgatctggtcaatgtggatttggatgactgcatctttgaacaataaatgatttaaatcaggtatggctgccgatggttatcttccagattggctcgaggacaaccttagtgaaggaattcgcgagtggtgggctttgaaacctggagcccctcaacccaaggcaaatcaacaacatcaagacaacgctcgaggtcttgtgcttccgggttacaaataccttggacccggcaacggactcgacaagggggagccggtcaacgcagcagacgcggcggccctcgagcacgacaaggcctacgaccagcagctcaaggccggagacaacccgtacctcaagtacaaccacgccgacgccgagttccaggagcggctcaaagaagatacgtcttttgggggcaacctcgggcgagcagtcttccaggccaaaaagaggcttcttgaacctcttggtctggttgaggaagcggctaagacggctcctggaaagaagaggcctgtagagcagtctcctcaggaaccggactcctccgcgggtattggcaaatcgggtgcacagcccgctaaaaagagactcaatttcggtcagactggcgacacagagtcagtcccagaccctcaaccaatcggagaacctcccgcagccccctcaggtgtgggatctcttacaatggcttcaggtggtggcgcaccagtggcagacaataacgaaggtgccgatggagtgggtagttcctcgggaaattggcattgcgattcccaatggctgggggacagagtcatcaccaccagcacccgaacctgggccctgcccacctacaacaatcacctctacaagcaaatctccaacagcacatctggaggatcttcaaatgacaacgcctacttcggctacagcaccccctgggggtattttgacttcaacagattccactgccacttctcaccacgtgactggcagcgactcatcaacaacaactggggattccggcctaagcgactcaacttcaagctcttcaacattcaggtcaaagaggttacggacaacaatggagtcaagaccatcgccaataaccttaccagcacggtccaggtcttcacggactcagactatcagctcccgtacgtgctcgggtcggctcacgagggctgcctcccgccgttcccagcggacgttttcatgattcctcagtacgggtatctgacgcttaatgatggaagccaggccgtgggtcgttcgtccttttactgcctggaatatttcccgtcgcaaatgctaagaacgggtaacaacttccagttcagctacgagtttgagaacgtacctttccatagcagctacgctcacagccaaagcctggaccgactaatgaatccactcatcgaccaatacttgtactatctctcaaagactattaacggttctggacagaatcaacaaacgctaaaattcagtgtggccggacccagcaacatggctgtccagggaagaaactacatacctggacccagctaccgacaacaacgtgtctcaaccactgtgactcaaaacaacaacagcgaatttgcttggcctggagcttcttcttgggctctcaatggacgtaatagcttgatgaatcctggacctgctatggccagccacaaagaaggagaggaccgtttctttcctttgtctggatctttaatttttggcaaacaaggaactggaagagacaacgtggatgcggacaaagtcatgataaccaacgaagaagaaattaaaactactaacccggtagcaacggagtcctatggacaagtggccacaaaccaccagagtgcccaagcacaggcgcagaccggctgggttcaaaaccaaggaatacttccgggtatggtttggcaggacagagatgtgtacctgcaaggacccatttgggccaaaattcctcacacggacggcaactttcacccttctccgctgatgggagggtttggaatgaagcacccgcctcctcagatcctcatcaaaaacacacctgtacctgcggatcctccaacggccttcaacaaggacaagctgaactctttcatcacccagtattctactggccaagtcagcgtggagatcgagtgggagctgcagaaggaaaacagcaagcgctggaacccggagatccagtacacttccaactattacaagtctaataatgttgaatttgctgttaatactgaaggtgtatatagtgaaccccgccccattggcaccagatacctgactcgtaatctgtaattgcttgttaatcaataaaccgtttaattcgtttcagttgaactttggtctctgcgaagggcgaattcgtttaaacctgcaggactagaggtcctgtattagaggtcacgtgagtgttttgcgacattttgcgacaccatgtggtcacgctgggtatttaagcccgagtgagcacgcagggtctccattttgaagcgggaggtttgaacgcgcagccgccaagccgaattctgcagatatccatcacactggcggccgctcgactagagcggccgccaccgcggtggagctccagcttttgttccctttagtgagggttaattgcgcgcttggcgtaatcatggtcatagctgtttcctgtgtgaaattgttatccgctcacaattccacacaacatacgagccggaagcataaagtgtaaagcctggggtgcctaatgagtgagctaactcacattaattgcgttgcgctcactgcccgctttccagtcgggaaacctgtcgtgccagctgcattaatgaatcggccaacgcgcggggagaggcggtttgcgtattgggcgctcttccgcttcctcgctcactgactcgctgcggaaccgtaaaaaggtctagataggtgagacgtccgcaggctaggtggaggctcagtgatgataagtctgcgatggtggatgcatgtgtcatggtcatagctgtttcctgtgtgaaattgttatccgctcagagggcacaatcctattccgcgctatccgacaatctccaagacattaggtggagttcagttcggcgtatggcataccccgtcacctttggcttatcagtgaagactaccatggtgcaatatctacgtgtgccgccggccccctcgcacagacttgtgggagaagctcggctactcccctgccccggttaatttgcatataatatttcctagtaactatagaggcttaatgtgcgataaaagacagataatctgttctttttaatactagctacattttacatgataggcttggatttctataagagatacaaatactaaattattattttaaaaaacagcacaaaaggaaactcaccctaactgtaaagtaattgtgtgttttgagactataaatatcccttggagaaaagccttgtttgtcttcgagaagacctgcctaggcaacagaaggctaaagaaggtatattgctgttgacagtgagcgacgtacctgatcatcaattaactgtgaagccacagatgggttaattgatgatcaggtacgctgcctactgcctcggacttcaaggggctactttaggagcaattatctttttttcaaaccatgattggtcgctaggaacatgggctgggggcctcgaacgctgacgtcatcaacccgctccaaggaatcgcgggcccagtgtcactaggcgggaacacccagcgcgcgtgcgccctggcaggaagatggctgtgagggacaggggagtggcgccctgcaatatttgcatgtcgctatgtgttctgggaaatcaccataaacgtgaaatgtctttggatttgggaatcttataagttctgtatgagaccactctttcccgcctaggcaacagaatgctaaagaaggtatattgctgttgacagtgagcgactaattgatgatcaggtacaggtctgtgaagccacagatgggtcctgtaccatcatcaattagctgcctactgcctcggacttcaaggggctactttaggagcaattatctttttttcaccctaaacggctcttcattgtatagtgccggaagagctataatcgagggtcttcagtgacatctggacgctaagaccgacgtcaggtggcacttttcggggaaatgtgtatgtcgctggaaagaacatgtgagcaaaaggccagcaaaaggccaggaaccgtaaaaaggccgcgttgctggcgtttttccataggctccgcccccctgacgagcatcacaaaaatcgacgctcaagtcagaggtggcgaaacccgacaggactataaagataccaggcgtttccccctggaagctccctcgtgcgctctcctgttccgaccctgccgcttaccggatacctgtccgcctttctcccttcgggaagcgtggcgctttctcatagctcacgctgtaggtatctcagttcggtgtaggtcgttcgctccaagctgggctgtgtgcacgaaccccccgttcagcccgaccgctgcgccttatccggtaactatcgtcttgagtccaacccggtaagacacgacttatcgccactggcagcagccactggtaacaggattagcagagcgaggtatgtaggcggtgctacagagttcttgaagtggtggcctaactacggctacactagaagaacagtatttggtatctgcgctctgctgaagccagttaccttcggaaaaagagttggtagctcttgatccggcaaacaaaccaccgctggtagcggtggtttttttgtttgcaagcagcagattacgcgcagaaaaaaaggatctcaagaagatcctttgatcttttctacggggtctgacgctctattcaacaaagccgccgtcccgtcaagtcagcgtaaatgggtagggggcttcaaatcgtccgctctgccagtgttacaaccaattaacaaattctgattagaaaaactcatcgagcatcaaatgaaactgcaatttattcatatcaggattatcaataccatatttttgaaaaagccgtttctgtaatgaaggagaaaactcaccgaggcagttccataggatggcaagatcctggtatcggtctgcgattccgactcgtccaacatcaatacaacctattaatttcccctcgtcaaaaataaggttatcaagtgagaaatcaccatgagtgacgactgaatccggtgagaatggcaaaagcttatgcatttctttccagacttgttcaacaggccagccattacgctcgtcatcaaaatcactcgcatcaaccaaaccgttattcattcgtgattgcgcctgagcgagacgaaatacgcgatcgctgttaaaaggacaattacaaacaggaatcgaatgcaaccggcgcaggaacactgccagcgcatcaacaatattttcacctgaatcaggatattcttctaatacctggaatgctgttttcccggggatcgcagtggtgagtaaccatgcatcatcaggagtacggataaaatgcttgatggtcggaagaggcataaattccgtcagccagtttagtctgaccatctcatctgtaacatcattggcaacgctacctttgccatgtttcagaaacaactctggcgcatcgggcttcccatacaatcgatagattgtcgcacctgattgcccgacattatcgcgagcccatttatacccatataaatcagcatccatgttggaatttaatcgcggcctcgagcaagacgtttcccgttgaatatggctcataacaccccttgtattactgtttatgtaagcagacagttttattgttcatgatgatatatttttatcttgtgcaatgtaacatcagagattttgagacacaacgtggctttcccccgccgctctagaactagtggatccaaataaaacgaaaggctcagtcgaaagactgggcctttcgttttatctgttgtttgtcgcattatacgagacgtccaggttgggatacctgaaacaaaacccatcgtacggccaaggaagtctccaataactgtgatccaccacaagcgccagggttttcccagtcacgacgttgtaaaacgacggccagtcatgcataatccgcacgcatctggaataaggaagtgccattccgcctgacct

SEQ ID NO: 4110 - DNA, 200 bp, synthetic construct; identical to SEQ ID NO: 3990
  source 1..200: mol_type = other DNA

SEQ ID NO: 4111 - DNA, 200 bp, synthetic construct; identical to SEQ ID NO: 3006
  source 1..200: mol_type = other DNA

SEQ ID NO: 4112 - DNA, 200 bp, synthetic construct; identical to SEQ ID NO: 3942
  source 1..200: mol_type = other DNA

SEQ ID NO: 4113 - DNA, 200 bp, synthetic construct; identical to SEQ ID NO: 3536
  source 1..200: mol_type = other DNA

SEQ ID NO: 4114 - DNA, 200 bp, synthetic construct; identical to SEQ ID NO: 2996
  source 1..200: mol_type = other DNA

SEQ ID NO: 4115 - DNA, 200 bp, synthetic construct; identical to SEQ ID NO: 3747
  source 1..200: mol_type = other DNA

SEQ ID NO: 4116 - DNA, 200 bp, synthetic construct; identical to SEQ ID NO: 3380
  source 1..200: mol_type = other DNA

SEQ ID NO: 4117 - DNA, 200 bp, synthetic construct; identical to SEQ ID NO: 3381
  source 1..200: mol_type = other DNA

SEQ ID NO: 4118 - DNA, 200 bp, synthetic construct; identical to SEQ ID NO: 3382
  source 1..200: mol_type = other DNA

SEQ ID NO: 4119 - DNA, 200 bp, synthetic construct; identical to SEQ ID NO: 3117
  source 1..200: mol_type = other DNA

SEQ ID NO: 4120 - DNA, 200 bp, synthetic construct; identical to SEQ ID NO: 3690
  source 1..200: mol_type = other DNA

SEQ ID NO: 4121 - DNA, 200 bp, synthetic construct; identical to SEQ ID NO: 3909
  source 1..200: mol_type = other DNA

SEQ ID NO: 4122 - DNA, 200 bp, synthetic construct; identical to SEQ ID NO: 3703
  source 1..200: mol_type = other DNA

SEQ ID NO: 4123 - DNA, 200 bp, synthetic construct; identical to SEQ ID NO: 3755
  source 1..200: mol_type = other DNA

SEQ ID NO: 4124 - DNA, 200 bp, synthetic construct; identical to SEQ ID NO: 3756
  source 1..200: mol_type = other DNA

SEQ ID NO: 4125 - DNA, 200 bp, synthetic construct; identical to SEQ ID NO: 3033
  source 1..200: mol_type = other DNA

SEQ ID NO: 4126 - DNA, 200 bp, synthetic construct; identical to SEQ ID NO: 3925
  source 1..200: mol_type = other DNA

SEQ ID NO: 4127 - DNA, 200 bp, synthetic construct; identical to SEQ ID NO: 3537
  source 1..200: mol_type = other DNA

SEQ ID NO: 4128 - DNA, 200 bp, synthetic construct; identical to SEQ ID NO: 3316
  source 1..200: mol_type = other DNA

SEQ ID NO: 4129 - DNA, 200 bp, synthetic construct; identical to SEQ ID NO: 3503
  source 1..200: mol_type = other DNA

SEQ ID NO: 4130 - DNA, 200 bp, synthetic construct; identical to SEQ ID NO: 3504
  source 1..200: mol_type = other DNA

SEQ ID NO: 4131 - DNA, 200 bp, synthetic construct; identical to SEQ ID NO: 3511
  source 1..200: mol_type = other DNA

SEQ ID NO: 4132 - DNA, 200 bp, synthetic construct; identical to SEQ ID NO: 3776
  source 1..200: mol_type = other DNA

SEQ ID NO: 4133 - DNA, 200 bp, synthetic construct; identical to SEQ ID NO: 3564
  source 1..200: mol_type = other DNA

SEQ ID NO: 4134 - DNA, 200 bp, synthetic construct; identical to SEQ ID NO: 3568
  source 1..200: mol_type = other DNA

SEQ ID NO: 4135 - DNA, 4352 bp, synthetic construct
  source 1..4352: mol_type = other DNA
cctgcaggcagctgcgcgctcgctcgctcactgaggccgcccgggcgtcgggcgacctttggtcgcccggcctcagtgagcgagcgagcgcgcagagagggagtggccaactccatcactaggggttcctgcggcctctagactcgaggcgttggcctccgcgccgggttttggcgcctcccgcgggcgcccccctcctcacggcgagcgctgccacgtcagacgaagggcgcagcgagcgtcctgatccttccgcccggacgctcaggacagcggcccgctgctcataagactcggccttagaaccccagtatcagcagaaggacattttaggacgggacttgggtgactctagggcactggttttctttccagagagcggaacaggcgaggaaaagtagtcccttctcggcgattctgcggagggatctccgtggggcggtgaacgccgatgattatataaggacgcgccgggtgtggcacagctagttccgtcgcagccgggatttgggtcgcggttcttgtttgtggatcgctgtgatcgtcacttggtctctggctaactaccggtgccaccatggccccagcggccaaacgggtgaagctggactctagacaagagatcaagagaatcaacaagatcagaaggagactggtcaaggacagcaacacaaagaaggccggcaagacaggccccatgaaaaccctgctcgtcagagtgatgacccctgacctgagagagcggctggaaaacctgagaaagaagcccgagaacatccctcagcctatcagcaacaccagcagggccaacctgaacaagctgctgaccgactacaccgagatgaagaaagccatcctgcacgtgtactgggaagagttccagaaagaccccgtgggcctgatgagcagagttgctcagcctgccagcaagaagatcgaccagaacaagctgaagcccgagatggacgagaagggcaatctgaccacagccggctttgcctgctctcagtgtggccagcctctgttcgtgtacaagctggaacaggtgtccgagaaaggcaaggcctacaccaactacttcggcagatgtaacgtggccgagcacgagaagctgattctgctggcccagctgaaacctgagaaggactctgatgaggccgtgacctacagcctgggcaagtttggacagagagccctggacttctacagcatccacgtgaccaaagaaagcacacaccccgtgaagcccctggctcagatcgccggcaatagatacgcctctggacctgtgggcaaagccctgtccgatgcctgcatgggaacaatcgccagcttcctgagcaagtaccaggacatcatcatcgagcaccagaaggtggtcaagggcaaccagaagagactggaaagcctgagggagctggccggcaaagagaacctggaataccccagcgtgaccctgcctcctcagcctcacacaaaagaaggcgtggacgcctacaacgaagtgatcgccagagtgagaatgtgggtcaacctgaacctgtggcagaagctgaaactgtccagggacgacgccaagcctctgctgagactgaagggcttccctagcttccctctggtggaaagacaggccaatgaagtggattggtgggacatggtctgcaacgtgaagaagctgatcaacgagaagaaagaggatggcaaggttttctggcagaacctggccggctacaagagacaagaagccctgaggccttacctgagcagcgaagaggaccggaagaagggcaagaagttcgccagataccagctgggcgacctgctgctgcacctggaaaagaagcacggcgaggactggggcaaagtgtacgatgaggcctgggagagaatcgacaagaaggtggaaggcctgagcaagcacattaagctggaagaggaaagaaggagcgaggacgcccaatctaaagccgctctgaccgattggctgagagccaaggccagctttgtgatcgagggcctgaaagaggccgacaaggacgagttctgcagatgcgagctgaagctgcagaagtggtacggcgatctgagaggcaagcccttcgccattgaggccgagaacagcatcctggacatcagcggcttcagcaagcagtacaactgcgccttcatttggcagaaagacggcgtcaagaaactgaacctgtacctgatcatcaattacttcaaaggcggcaagctgcggttcaagaagatcaaacccgaggccttcgaggctaacagattctacaccgtgatcaacaaaaagtccggcgagatcgtgcccatggaagtgaacttcaacttcgacgaccccaacctgattatcctgcctctggccttcggcaagagacagggcagagagttcatctggaacgatctgctgagcctggaaaccggctctctgaagctggccaatggcagagtgatcgagaaaaccctgtacaacaggagaaccagacaggacgagcctgctctgtttgtggccctgaccttcgagagaagagaggtgctggacagcagcaacatcaagcccatgaacctgatcggcgtggaccggggcgagaatatccctgctgtgatcgccctgacagaccctgaaggatgcccactgagcagattcaaggactccctgggcaaccctacacacatcctgagaatcggcgagagctacaaagagaagcagaggacaatccaggccaagaaagaggtggaacagcgcagagccggcggatactctaggaagtacgccagcaaggccaagaatctggccgacgacatggtccgaaacaccgccagagatctgctgtactacgccgtgacacaggacgccatgctgatcttcgagaatctgagcagaggcttcggccggcagggcaagagaacctttatggccgagaggcagtacaccagaatggaagattggctcacagctaaactggcctacgagggactgagcaagacctacctgtccaaaacactggcccagtatacctccaagacctgcagcaattgcggcttcaccatcaccagcgccgactacgacagagtgctggaaaagctcaagaaaaccgccaccggctggatgaccaccatcaacggcaaagagctgaaggttgagggccagatcacctactacaacaggtacaagaggcagaacgtcgtgaaggatctgagcgtggaactggacagactgagcgaagagagcgtgaacaacgacatcagcagctggacaaagggcagatcaggcgaggctctgagcctgctgaagaagaggtttagccacagacctgtgcaagagaagttcgtgtgcctgaactgcggcttcgagacacacgccgatgaacaggctgccctgaacattgccagaagctggctgttcctgagaagccaagagtacaagaagtaccagaccaacaagaccaccggcaacaccgacaagagggcctttgtggaaacctggcagagcttctacagaaaaaagctgaaagaagtctggaagcccgccgtgggctcccccgccgcgaagcgagtgaaactggactaagaattcctagagctcgctgatcagcctcgactgtgccttctagttgccagccatctgttgtttgcccctcccccgtgccttccttgaccctggaaggtgccactcccactgtcctttcctaataaaatgaggaaattgcatcgcattgtctgagtaggtgtcattctattctggggggtggggtggggcaggacagcaagggggaggattgggaagagaatagcaggcatgctggggaggtaccgtgagggcctatttcccatgattccttcatatttgcatatacgatacaaggctgttagagagataattggaattaatttgactgtaaacacaaagatattagtacaaaatacgtgacgtagaaagtaataatttcttgggtagtttgcagttttaaaattatgttttaaaatggactatcatatgcttaccgtaacttgaaagtatttcgatttcttggctttatatatcttgtggaaaggacgaaacaccactggcgcttctatctgattactctgagcgccatcaccagcgactatgtcgtagtgggtaaagccgcttacggacttcggtccgtaagaggcatcagagaggggtcttcgagaagaccctttttggcggccgcaggaacccctagtgatggagttggccactccctctctgcgcgctcgctcgctcactgaggccgggcgaccaaaggtcgcccgacgcccgggctttgcccgggcggcctcagtgagcgagcgagcgcgcagctgcctgcagg

SEQ ID NO: 4136 - DNA, 4352 bp, synthetic construct
  source 1..4352: mol_type = other DNA
cctgcaggcagctgcgcgctcgctcgctcactgaggccgcccgggcgtcgggcgacctttggtcgcccggcctcagtgagcgagcgagcgcgcagagagggagtggccaactccatcactaggggttcctgcggcctctagactcgaggcgttggcctccgcgccgggttttggcgcctcccgcgggcgcccccctcctcacggcgagcgctgccacgtcagacgaagggcgcagcgagcgtcctgatccttccgcccggacgctcaggacagcggcccgctgctcataagactcggccttagaaccccagtatcagcagaaggacattttaggacgggacttgggtgactctagggcactggttttctttccagagagcggaacaggcgaggaaaagtagtcccttctcggcgattctgcggagggatctccgtggggcggtgaacgccgatgattatataaggacgcgccgggtgtggcacagctagttccgtcgcagccgggatttgggtcgcggttcttgtttgtggatcgctgtgatcgtcacttggtctctggctaactaccggtgccaccatggccccagcggccaaacgggtgaagctggactctagacaagagatcaagagaatcaacaagatcagaaggagactggtcaaggacagcaacacaaagaaggccggcaagacaggccccatgaaaaccctgctcgtcagagtgatgacccctgacctgagagagcggctggaaaacctgagaaagaagcccgagaacatccctcagcctatcagcaacaccagcagggccaacctgaacaagctgctgaccgactacaccgagatgaagaaagccatcctgcacgtgtactgggaagagttccagaaagaccccgtgggcctgatgagcagagttgctcagcctgccagcaagaagatcgaccagaacaagctgaagcccgagatggacgagaagggcaatctgaccacagccggctttgcctgctctcagtgtggccagcctctgttcgtgtacaagctggaacaggtgtccgagaaaggcaaggcctacaccaactacttcggcagatgtaacgtggccgagcacgagaagctgattctgctggcccagctgaaacctgagaaggactctgatgaggccgtgacctacagcctgggcaagtttggacagagagccctggacttctacagcatccacgtgaccaaagaaagcacacaccccgtgaagcccctggctcagatcgccggcaatagatacgcctctggacctgtgggcaaagccctgtccgatgcctgcatgggaacaatcgccagcttcctgagcaagtaccaggacatcatcatcgagcaccagaaggtggtcaagggcaaccagaagagactggaaagcctgagggagctggccggcaaagagaacctggaataccccagcgtgaccctgcctcctcagcctcacacaaaagaaggcgtggacgcctacaacgaagtgatcgccagagtgagaatgtgggtcaacctgaacctgtggcagaagctgaaactgtccagggacgacgccaagcctctgctgagactgaagggcttccctagcttccctctggtggaaagacaggccaatgaagtggattggtgggacatggtctgcaacgtgaagaagctgatcaacgagaagaaagaggatggcaaggttttctggcagaacctggccggctacaagagacaagaagccctgaggccttacctgagcagcgaagaggaccggaagaagggcaagaagttcgccagataccagctgggcgacctgctgctgcacctggaaaagaagcacggcgaggactggggcaaagtgtacgatgaggcctgggagagaatcgacaagaaggtggaaggcctgagcaagcacattaagctggaagaggaaagaaggagcgaggacgcccaatctaaagccgctctgaccgattggctgagagccaaggccagctttgtgatcgagggcctgaaagaggccgacaaggacgagttctgcagatgcgagctgaagctgcagaagtggtacggcgatctgagaggcaagcccttcgccattgaggccgagaacagcatcctggacatcagcggcttcagcaagcagtacaactgcgccttcatttggcagaaagacggcgtcaagaaactgaacctgtacctgatcatcaattacttcaaaggcggcaagctgcggttcaagaagatcaaacccgaggccttcgaggctaacagattctacaccgtgatcaacaaaaagtccggcgagatcgtgcccatggaagtgaacttcaacttcgacgaccccaacctgattatcctgcctctggccttcggcaagagacagggcagagagttcatctggaacgatctgctgagcctggaaaccggctctctgaagctggccaatggcagagtgatcgagaaaaccctgtacaacaggagaaccagacaggacgagcctgctctgtttgtggccctgaccttcgagagaagagaggtgctggacagcagcaacatcaagcccatgaacctgatcggcgtggaccggggcgagaatatccctgctgtgatcgccctgacagaccctgaaggatgcccactgagcagattcaaggactccctgggcaaccctacacacatcctgagaatcggcgagagctacaaagagaagcagaggacaatccaggccaagaaagaggtggaacagcgcagagccggcggatactctaggaagtacgccagcaaggccaagaatctggccgacgacatggtccgaaacaccgccagagatctgctgtactacgccgtgacacaggacgccatgctgatcttcgagaatctgagcagaggcttcggccggcagggcaagagaacctttatggccgagaggcagtacaccagaatggaagattggctcacagctaaactggcctacgagggactgagcaagacctacctgtccaaaacactggcccagtatacctccaagacctgcagcaattgcggcttcaccatcaccagcgccgactacgacagagtgctggaaaagctcaagaaaaccgccaccggctggatgaccaccatcaacggcaaagagctgaaggttgagggccagatcacctactacaacaggtacaagaggcagaacgtcgtgaaggatctgagcgtggaactggacagactgagcgaagagagcgtgaacaacgacatcagcagctggacaaagggcagatcaggcgaggctctgagcctgctgaagaagaggtttagccacagacctgtgcaagagaagttcgtgtgcctgaactgcggcttcgagacacacgccgatgaacaggctgccctgaacattgccagaagctggctgttcctgagaagccaagagtacaagaagtaccagaccaacaagaccaccggcaacaccgacaagagggcctttgtggaaacctggcagagcttctacagaaaaaagctgaaagaagtctggaagcccgccgtgggctcccccgccgcgaagcgagtgaaactggactaagaattcctagagctcgctgatcagcctcgactgtgccttctagttgccagccatctgttgtttgcccctcccccgtgccttccttgaccctggaaggtgccactcccactgtcctttcctaataaaatgaggaaattgcatcgcattgtctgagtaggtgtcattctattctggggggtggggtggggcaggacagcaagggggaggattgggaagagaatagcaggcatgctggggaggtaccgtgagggcctatttcccatgattccttcatatttgcatatacgatacaaggctgttagagagataattggaattaatttgactgtaaacacaaagatattagtacaaaatacgtgacgtagaaagtaataatttcttgggtagtttgcagttttaaaattatgttttaaaatggactatcatatgcttaccgtaacttgaaagtatttcgatttcttggctttatatatcttgtggaaaggacgaaacaccactggcgcttctatctgattactctgagcgccatcaccagcgactatgtcgtagtgggtaaagccgcttacggacttcggtccgtaagaggcatcagagctgcattctagttgtggttttttttggcggccgcaggaacccctagtgatggagttggccactccctctctgcgcgctcgctcgctcactgaggccgggcgaccaaaggtcgcccgacgcccgggctttgcccgggcggcctcagtgagcgagcgagcgcgcagctgcctgcagg

SEQ ID NO: 4137 - DNA, 4344 bp, synthetic construct
  source 1..4344: mol_type = other DNA
cctgcaggcagctgcgcgctcgctcgctcactgaggccgcccgggcgtcgggcgacctttggtcgcccggcctcagtgagcgagcgagcgcgcagagagggagtggccaactccatcactaggggttcctgcggcctctagactcgaggcgttggcctccgcgccgggttttggcgcctcccgcgggcgcccccctcctcacggcgagcgctgccacgtcagacgaagggcgcagcgagcgtcctgatccttccgcccggacgctcaggacagcggcccgctgctcataagactcggccttagaaccccagtatcagcagaaggacattttaggacgggacttgggtgactctagggcactggttttctttccagagagcggaacaggcgaggaaaagtagtcccttctcggcgattctgcggagggatctccgtggggcggtgaacgccgatgattatataaggacgcgccgggtgtggcacagctagttccgtcgcagccgggatttgggtcgcggttcttgtttgtggatcgctgtgatcgtcacttggtctctggctaactaccggtgccaccatggccccagcggccaaacgggtgaagctggactctagacaagagatcaagagaatcaacaagatcagaaggagactggtcaaggacagcaacacaaagaaggccggcaagacaggccccatgaaaaccctgctcgtcagagtgatgacccctgacctgagagagcggctggaaaacctgagaaagaagcccgagaacatccctcagcctatcagcaacaccagcagggccaacctgaacaagctgctgaccgactacaccgagatgaagaaagccatcctgcacgtgtactgggaagagttccagaaagaccccgtgggcctgatgagcagagttgctcagcctgccagcaagaagatcgaccagaacaagctgaagcccgagatggacgagaagggcaatctgaccacagccggctttgcctgctctcagtgtggccagcctctgttcgtgtacaagctggaacaggtgtccgagaaaggcaaggcctacaccaactacttcggcagatgtaacgtggccgagcacgagaagctgattctgctggcccagctgaaacctgagaaggactctgatgaggccgtgacctacagcctgggcaagtttggacagagagccctggacttctacagcatccacgtgaccaaagaaagcacacaccccgtgaagcccctggctcagatcgccggcaatagatacgcctctggacctgtgggcaaagccctgtccgatgcctgcatgggaacaatcgccagcttcctgagcaagtaccaggacatcatcatcgagcaccagaaggtggtcaagggcaaccagaagagactggaaagcctgagggagctggccggcaaagagaacctggaataccccagcgtgaccctgcctcctcagcctcacacaaaagaaggcgtggacgcctacaacgaagtgatcgccagagtgagaatgtgggtcaacctgaacctgtggcagaagctgaaactgtccagggacgacgccaagcctctgctgagactgaagggcttccctagcttccctctggtggaaagacaggccaatgaagtggattggtgggacatggtctgcaacgtgaagaagctgatcaacgagaagaaagaggatggcaaggttttctggcagaacctggccggctacaagagacaagaagccctgaggccttacctgagcagcgaagaggaccggaagaagggcaagaagttcgccagataccagctgggcgacctgctgctgcacctggaaaagaagcacggcgaggactggggcaaagtgtacgatgaggcctgggagagaatcgacaagaaggtggaaggcctgagcaagcacattaagctggaagaggaaagaaggagcgaggacgcccaatctaaagccgctctgaccgattggctgagagccaaggccagctttgtgatcgagggcctgaaagaggccgacaaggacgagttctgcagatgcgagctgaagctgcagaagtggtacggcgatctgagaggcaagcccttcgccattgaggccgagaacagcatcctggacatcagcggcttcagcaagcagtacaactgcgccttcatttggcagaaagacggcgtcaagaaactgaacctgtacctgatcatcaattacttcaaaggcggcaagctgcggttcaagaagatcaaacccgaggccttcgaggctaacagattctacaccgtgatcaacaaaaagtccggcgagatcgtgcccatggaagtgaacttcaacttcgacgaccccaacctgattatcctgcctctggccttcggcaagagacagggcagagagttcatctggaacgatctgctgagcctggaaaccggctctctgaagctggccaatggcagagtgatcgagaaaaccctgtacaacaggagaaccagacaggacgagcctgctctgtttgtggccctgaccttcgagagaagagaggtgctggacagcagcaacatcaagcccatgaacctgatcggcgtggaccggggcgagaatatccctgctgtgatcgccctgacagaccctgaaggatgcccactgagcagattcaaggactccctgggcaaccctacacacatcctgagaatcggcgagagctacaaagagaagcagaggacaatccaggccaagaaagaggtggaacagcgcagagccggcggatactctaggaagtacgccagcaaggccaagaatctggccgacgacatggtccgaaacaccgccagagatctgctgtactacgccgtgacacaggacgccatgctgatcttcgagaatctgagcagaggcttcggccggcagggcaagagaacctttatggccgagaggcagtacaccagaatggaagattggctcacagctaaactggcctacgagggactgagcaagacctacctgtccaaaacactggcccagtatacctccaagacctgcagcaattgcggcttcaccatcaccagcgccgactacgacagagtgctggaaaagctcaagaaaaccgccaccggctggatgaccaccatcaacggcaaagagctgaaggttgagggccagatcacctactacaacaggtacaagaggcagaacgtcgtgaaggatctgagcgtggaactggacagactgagcgaagagagcgtgaacaacgacatcagcagctggacaaagggcagatcaggcgaggctctgagcctgctgaagaagaggtttagccacagacctgtgcaagagaagttcgtgtgcctgaactgcggcttcgagacacacgccgatgaacaggctgccctgaacattgccagaagctggctgttcctgagaagccaagagtacaagaagtaccagaccaacaagaccaccggcaacaccgacaagagggcctttgtggaaacctggcagagcttctacagaaaaaagctgaaagaagtctggaagcccgccgtgggctcccccgccgcgaagcgagtgaaactggactaagaattcctagagctcgctgatcagcctcgactgtgccttctagttgccagccatctgttgtttgcccctcccccgtgccttccttgaccctggaaggtgccactcccactgtcctttcctaataaaatgaggaaattgcatcgcattgtctgagtaggtgtcattctattctggggggtggggtggggcaggacagcaagggggaggattgggaagagaatagcaggcatgctggggaggtaccaaaccacaactagaatgcagctctgatgcctcttacggaccgaagtccgtaagcggctttacccactacgacatagtcgctggtgatggcgctcagagtaatcagatagaagcgccagtggtgtttcgtcctttccacaagatatataaagccaagaaatcgaaatactttcaagttacggtaagcatatgatagtccattttaaaacataattttaaaactgcaaactacccaagaaattattactttctacgtcacgtattttgtactaatatctttgtgtttacagtcaaattaattccaattatctctctaacagccttgtatcgtatatgcaaatatgaaggaatcatgggaaataggccctcgcggccgcaggaacccctagtgatggagttggccactccctctctgcgcgctcgctcgctcactgaggccgggcgaccaaaggtcgcccgacgcccgggctttgcccgggcggcctcagtgagcgagcgagcgcgcagctgcctgcagg

SEQ ID NO: 4138 - DNA, 4354 bp, synthetic construct
  source 1..4354: mol_type = other DNA
cctgcaggcagctgcgcgctcgctcgctcactgaggccgcccgggcgtcgggcgacctttggtcgcccggcctcagtgagcgagcgagcgcgcagagagggagtggccaactccatcactaggggttcctgcggcctctgagggcctatttcccatgattccttcatatttgcatatacgatacaaggctgttagagagataattggaattaatttgactgtaaacacaaagatattagtacaaaatacgtgacgtagaaagtaataatttcttgggtagtttgcagttttaaaattatgttttaaaatggactatcatatgcttaccgtaacttgaaagtatttcgatttcttggctttatatatcttgtggaaaggacgaaacaccactggcgcttctatctgattactctgagcgccatcaccagcgactatgtcgtagtgggtaaagccgcttacggacttcggtccgtaagaggcatcagagaggggtcttcgagaagacccttttttttgcctcgaggcgttggcctccgcgccgggttttggcgcctcccgcgggcgcccccctcctcacggcgagcgctgccacgtcagacgaagggcgcagcgagcgtcctgatccttccgcccggacgctcaggacagcggcccgctgctcataagactcggccttagaaccccagtatcagcagaaggacattttaggacgggacttgggtgactctagggcactggttttctttccagagagcggaacaggcgaggaaaagtagtcccttctcggcgattctgcggagggatctccgtggggcggtgaacgccgatgattatataaggacgcgccgggtgtggcacagctagttccgtcgcagccgggatttgggtcgcggttcttgtttgtggatcgctgtgatcgtcacttggtctctggctaactaccggtgccaccatggccccagcggccaaacgggtgaagctggactctagacaagagatcaagagaatcaacaagatcagaaggagactggtcaaggacagcaacacaaagaaggccggcaagacaggccccatgaaaaccctgctcgtcagagtgatgacccctgacctgagagagcggctggaaaacctgagaaagaagcccgagaacatccctcagcctatcagcaacaccagcagggccaacctgaacaagctgctgaccgactacaccgagatgaagaaagccatcctgcacgtgtactgggaagagttccagaaagaccccgtgggcctgatgagcagagttgctcagcctgccagcaagaagatcgaccagaacaagctgaagcccgagatggacgagaagggcaatctgaccacagccggctttgcctgctctcagtgtggccagcctctgttcgtgtacaagctggaacaggtgtccgagaaaggcaaggcctacaccaactacttcggcagatgtaacgtggccgagcacgagaagctgattctgctggcccagctgaaacctgagaaggactctgatgaggccgtgacctacagcctgggcaagtttggacagagagccctggacttctacagcatccacgtgaccaaagaaagcacacaccccgtgaagcccctggctcagatcgccggcaatagatacgcctctggacctgtgggcaaagccctgtccgatgcctgcatgggaacaatcgccagcttcctgagcaagtaccaggacatcatcatcgagcaccagaaggtggtcaagggcaaccagaagagactggaaagcctgagggagctggccggcaaagagaacctggaataccccagcgtgaccctgcctcctcagcctcacacaaaagaaggcgtggacgcctacaacgaagtgatcgccagagtgagaatgtgggtcaacctgaacctgtggcagaagctgaaactgtccagggacgacgccaagcctctgctgagactgaagggcttccctagcttccctctggtggaaagacaggccaatgaagtggattggtgggacatggtctgcaacgtgaagaagctgatcaacgagaagaaagaggatggcaaggttttctggcagaacctggccggctacaagagacaagaagccctgaggccttacctgagcagcgaagaggaccggaagaagggcaagaagttcgccagataccagctgggcgacctgctgctgcacctggaaaagaagcacggcgaggactggggcaaagtgtacgatgaggcctgggagagaatcgacaagaaggtggaaggcctgagcaagcacattaagctggaagaggaaagaaggagcgaggacgcccaatctaaagccgctctgaccgattggctgagagccaaggccagctttgtgatcgagggcctgaaagaggccgacaaggacgagttctgcagatgcgagctgaagctgcagaagtggtacggcgatctgagaggcaagcccttcgccattgaggccgagaacagcatcctggacatcagcggcttcagcaagcagtacaactgcgccttcatttggcagaaagacggcgtcaagaaactgaacctgtacctgatcatcaattacttcaaaggcggcaagctgcggttcaagaagatcaaacccgaggccttcgaggctaacagattctacaccgtgatcaacaaaaagtccggcgagatcgtgcccatggaagtgaacttcaacttcgacgaccccaacctgattatcctgcctctggccttcggcaagagacagggcagagagttcatctggaacgatctgctgagcctggaaaccggctctctgaagctggccaatggcagagtgatcgagaaaaccctgtacaacaggagaaccagacaggacgagcctgctctgtttgtggccctgaccttcgagagaagagaggtgctggacagcagcaacatcaagcccatgaacctgatcggcgtggaccggggcgagaatatccctgctgtgatcgccctgacagaccctgaaggatgcccactgagcagattcaaggactccctgggcaaccctacacacatcctgagaatcggcgagagctacaaagagaagcagaggacaatccaggccaagaaagaggtggaacagcgcagagccggcggatactctaggaagtacgccagcaaggccaagaatctggccgacgacatggtccgaaacaccgccagagatctgctgtactacgccgtgacacaggacgccatgctgatcttcgagaatctgagcagaggcttcggccggcagggcaagagaacctttatggccgagaggcagtacaccagaatggaagattggctcacagctaaactggcctacgagggactgagcaagacctacctgtccaaaacactggcccagtatacctccaagacctgcagcaattgcggcttcaccatcaccagcgccgactacgacagagtgctggaaaagctcaagaaaaccgccaccggctggatgaccaccatcaacggcaaagagctgaaggttgagggccagatcacctactacaacaggtacaagaggcagaacgtcgtgaaggatctgagcgtggaactggacagactgagcgaagagagcgtgaacaacgacatcagcagctggacaaagggcagatcaggcgaggctctgagcctgctgaagaagaggtttagccacagacctgtgcaagagaagttcgtgtgcctgaactgcggcttcgagacacacgccgatgaacaggctgccctgaacattgccagaagctggctgttcctgagaagccaagagtacaagaagtaccagaccaacaagaccaccggcaacaccgacaagagggcctttgtggaaacctggcagagcttctacagaaaaaagctgaaagaagtctggaagcccgccgtgggctcccccgccgcgaagcgagtgaaactggactaagaattcctagagctcgctgatcagcctcgactgtgccttctagttgccagccatctgttgtttgcccctcccccgtgccttccttgaccctggaaggtgccactcccactgtcctttcctaataaaatgaggaaattgcatcgcattgtctgagtaggtgtcattctattctggggggtggggtggggcaggacagcaagggggaggattgggaagagaatagcaggcatgctggggaggtaccgtggcggccgcaggaacccctagtgatggagttggccactccctctctgcgcgctcgctcgctcactgaggccgggcgaccaaaggtcgcccgacgcccgggctttgcccgggcggcctcagtgagcgagcgagcgcgcagctgcctgcagg

SEQ ID NO: 4139 - DNA, 4354 bp, synthetic construct
  source 1..4354: mol_type = other DNA
cctgcaggcagctgcgcgctcgctcgctcactgaggccgcccgggcgtcgggcgacctttggtcgcccggcctcagtgagcgagcgagcgcgcagagagggagtggccaactccatcactaggggttcctgcggcctctgagggcctatttcccatgattccttcatatttgcatatacgatacaaggctgttagagagataattggaattaatttgactgtaaacacaaagatattagtacaaaatacgtgacgtagaaagtaataatttcttgggtagtttgcagttttaaaattatgttttaaaatggactatcatatgcttaccgtaacttgaaagtatttcgatttcttggctttatatatcttgtggaaaggacgaaacaccactggcgcttctatctgattactctgagcgccatcaccagcgactatgtcgtagtgggtaaagccgcttacggacttcggtccgtaagaggcatcagagctgcattctagttgtggtttttttttttgcctcgaggcgttggcctccgcgccgggttttggcgcctcccgcgggcgcccccctcctcacggcgagcgctgccacgtcagacgaagggcgcagcgagcgtcctgatccttccgcccggacgctcaggacagcggcccgctgctcataagactcggccttagaaccccagtatcagcagaaggacattttaggacgggacttgggtgactctagggcactggttttctttccagagagcggaacaggcgaggaaaagtagtcccttctcggcgattctgcggagggatctccgtggggcggtgaacgccgatgattatataaggacgcgccgggtgtggcacagctagttccgtcgcagccgggatttgggtcgcggttcttgtttgtggatcgctgtgatcgtcacttggtctctggctaactaccggtgccaccatggccccagcggccaaacgggtgaagctggactctagacaagagatcaagagaatcaacaagatcagaaggagactggtcaaggacagcaacacaaagaaggccggcaagacaggccccatgaaaaccctgctcgtcagagtgatgacccctgacctgagagagcggctggaaaacctgagaaagaagcccgagaacatccctcagcctatcagcaacaccagcagggccaacctgaacaagctgctgaccgactacaccgagatgaagaaagccatcctgcacgtgtactgggaagagttccagaaagaccccgtgggcctgatgagcagagttgctcagcctgccagcaagaagatcgaccagaacaagctgaagcccgagatggacgagaagggcaatctgaccacagccggctttgcctgctctcagtgtggccagcctctgttcgtgtacaagctggaacaggtgtccgagaaaggcaaggcctacaccaactacttcggcagatgtaacgtggccgagcacgagaagctgattctgctggcccagctgaaacctgagaaggactctgatgaggccgtgacctacagcctgggcaagtttggacagagagccctggacttctacagcatccacgtgaccaaagaaagcacacaccccgtgaagcccctggctcagatcgccggcaatagatacgcctctggacctgtgggcaaagccctgtccgatgcctgcatgggaacaatcgccagcttcctgagcaagtaccaggacatcatcatcgagcaccagaaggtggtcaagggcaaccagaagagactggaaagcctgagggagctggccggcaaagagaacctggaataccccagcgtgaccctgcctcctcagcctcacacaaaagaaggcgtggacgcctacaacgaagtgatcgccagagtgagaatgtgggtcaacctgaacctgtggcagaagctgaaactgtccagggacgacgccaagcctctgctgagactgaagggcttccctagcttccctctggtggaaagacaggccaatgaagtggattggtgggacatggtctgcaacgtgaagaagctgatcaacgagaagaaagaggatggcaaggttttctggcagaacctggccggctacaagagacaagaagccctgaggccttacctgagcagcgaagaggaccggaagaagggcaagaagttcgccagataccagctgggcgacctgctgctgcacctggaaaagaagcacggcgaggactggggcaaagtgtacgatgaggcctgggagagaatcgacaagaaggtggaaggcctgagcaagcacattaagctggaagaggaaagaaggagcgaggacgcccaatctaaagccgctctgaccgattggctgagagccaaggccagctttgtgatcgagggcctgaaagaggccgacaaggacgagttctgcagatgcgagctgaagctgcagaagtggtacggcgatctgagaggcaagcccttcgccattgaggccgagaacagcatcctggacatcagcggcttcagcaagcagtacaactgcgccttcatttggcagaaagacggcgtcaagaaactgaacctgtacctgatcatcaattacttcaaaggcggcaagctgcggttcaagaagatcaaacccgaggccttcgaggctaacagattctacaccgtgatcaacaaaaagtccggcgagatcgtgcccatggaagtgaacttcaacttcgacgaccccaacctgattatcctgcctctggccttcggcaagagacagggcagagagttcatctggaacgatctgctgagcctggaaaccggctctctgaagctggccaatggcagagtgatcgagaaaaccctgtacaacaggagaaccagacaggacgagcctgctctgtttgtggccctgaccttcgagagaagagaggtgctggacagcagcaacatcaagcccatgaacctgatcggcgtggaccggggcgagaatatccctgctgtgatcgccctgacagaccctgaaggatgcccactgagcagattcaaggactccctgggcaaccctacacacatcctgagaatcggcgagagctacaaagagaagcagaggacaatccaggccaagaaagaggtggaacagcgcagagccggcggatactctaggaagtacgccagcaaggccaagaatctggccgacgacatggtccgaaacaccgccagagatctgctgtactacgccgtgacacaggacgccatgctgatcttcgagaatctgagcagaggcttcggccggcagggcaagagaacctttatggccgagaggcagtacaccagaatggaagattggctcacagctaaactggcctacgagggactgagcaagacctacctgtccaaaacactggcccagtatacctccaagacctgcagcaattgcggcttcaccatcaccagcgccgactacgacagagtgctggaaaagctcaagaaaaccgccaccggctggatgaccaccatcaacggcaaagagctgaaggttgagggccagatcacctactacaacaggtacaagaggcagaacgtcgtgaaggatctgagcgtggaactggacagactgagcgaagagagcgtgaacaacgacatcagcagctggacaaagggcagatcaggcgaggctctgagcctgctgaagaagaggtttagccacagacctgtgcaagagaagttcgtgtgcctgaactgcggcttcgagacacacgccgatgaacaggctgccctgaacattgccagaagctggctgttcctgagaagccaagagtacaagaagtaccagaccaacaagaccaccggcaacaccgacaagagggcctttgtggaaacctggcagagcttctacagaaaaaagctgaaagaagtctggaagcccgccgtgggctcccccgccgcgaagcgagtgaaactggactaagaattcctagagctcgctgatcagcctcgactgtgccttctagttgccagccatctgttgtttgcccctcccccgtgccttccttgaccctggaaggtgccactcccactgtcctttcctaataaaatgaggaaattgcatcgcattgtctgagtaggtgtcattctattctggggggtggggtggggcaggacagcaagggggaggattgggaagagaatagcaggcatgctggggaggtaccgtggcggccgcaggaacccctagtgatggagttggccactccctctctgcgcgctcgctcgctcactgaggccgggcgaccaaaggtcgcccgacgcccgggctttgcccgggcggcctcagtgagcgagcgagcgcgcagctgcctgcagg

SEQ ID NO: 4140 - DNA, 4364 bp, synthetic construct
  source 1..4364: mol_type = other DNA
cctgcaggcagctgcgcgctcgctcgctcactgaggccgcccgggcgtcgggcgacctttggtcgcccggcctcagtgagcgagcgagcgcgcagagagggagtggccaactccatcactaggggttcctgcggcctctagacaagcttgcaaaaaaaaaaaccacaactagaatgcagctctgatgcctcttacggaccgaagtccgtaagcggctttacccactacgacatagtcgctggtgatggcgctcagagtaatcagatagaagcgccagtggtgtttcgtcctttccacaagatatataaagccaagaaatcgaaatactttcaagttacggtaagcatatgatagtccattttaaaacataattttaaaactgcaaactacccaagaaattattactttctacgtcacgtattttgtactaatatctttgtgtttacagtcaaattaattccaattatctctctaacagccttgtatcgtatatgcaaatatgaaggaatcatgggaaataggccctcctcgaggcgttggcctccgcgccgggttttggcgcctcccgcgggcgcccccctcctcacggcgagcgctgccacgtcagacgaagggcgcagcgagcgtcctgatccttccgcccggacgctcaggacagcggcccgctgctcataagactcggccttagaaccccagtatcagcagaaggacattttaggacgggacttgggtgactctagggcactggttttctttccagagagcggaacaggcgaggaaaagtagtcccttctcggcgattctgcggagggatctccgtggggcggtgaacgccgatgattatataaggacgcgccgggtgtggcacagctagttccgtcgcagccgggatttgggtcgcggttcttgtttgtggatcgctgtgatcgtcacttggtctctggctaactaccggtgccaccatggccccagcggccaaacgggtgaagctggactctagacaagagatcaagagaatcaacaagatcagaaggagactggtcaaggacagcaacacaaagaaggccggcaagacaggccccatgaaaaccctgctcgtcagagtgatgacccctgacctgagagagcggctggaaaacctgagaaagaagcccgagaacatccctcagcctatcagcaacaccagcagggccaacctgaacaagctgctgaccgactacaccgagatgaagaaagccatcctgcacgtgtactgggaagagttccagaaagaccccgtgggcctgatgagcagagttgctcagcctgccagcaagaagatcgaccagaacaagctgaagcccgagatggacgagaagggcaatctgaccacagccggctttgcctgctctcagtgtggccagcctctgttcgtgtacaagctggaacaggtgtccgagaaaggcaaggcctacaccaactacttcggcagatgtaacgtggccgagcacgagaagctgattctgctggcccagctgaaacctgagaaggactctgatgaggccgtgacctacagcctgggcaagtttggacagagagccctggacttctacagcatccacgtgaccaaagaaagcacacaccccgtgaagcccctggctcagatcgccggcaatagatacgcctctggacctgtgggcaaagccctgtccgatgcctgcatgggaacaatcgccagcttcctgagcaagtaccaggacatcatcatcgagcaccagaaggtggtcaagggcaaccagaagagactggaaagcctgagggagctggccggcaaagagaacctggaataccccagcgtgaccctgcctcctcagcctcacacaaaagaaggcgtggacgcctacaacgaagtgatcgccagagtgagaatgtgggtcaacctgaacctgtggcagaagctgaaactgtccagggacgacgccaagcctctgctgagactgaagggcttccctagcttccctctggtggaaagacaggccaatgaagtggattggtgggacatggtctgcaacgtgaagaagctgatcaacgagaagaaagaggatggcaaggttttctggcagaacctggccggctacaagagacaagaagccctgaggccttacctgagcagcgaagaggaccggaagaagggcaagaagttcgccagataccagctgggcgacctgctgctgcacctggaaaagaagcacggcgaggactggggcaaagtgtacgatgaggcctgggagagaatcgacaagaaggtggaaggcctgagcaagcacattaagctggaagaggaaagaaggagcgaggacgcccaatctaaagccgctctgaccgattggctgagagccaaggccagctttgtgatcgagggcctgaaagaggccgacaaggacgagttctgcagatgcgagctgaagctgcagaagtggtacggcgatctgagaggcaagcccttcgccattgaggccgagaacagcatcctggacatcagcggcttcagcaagcagtacaactgcgccttcatttggcagaaagacggcgtcaagaaactgaacctgtacctgatcatcaattacttcaaaggcggcaagctgcggttcaagaagatcaaacccgaggccttcgaggctaacagattctacaccgtgatcaacaaaaagtccggcgagatcgtgcccatggaagtgaacttcaacttcgacgaccccaacctgattatcctgcctctggccttcggcaagagacagggcagagagttcatctggaacgatctgctgagcctggaaaccggctctctgaagctggccaatggcagagtgatcgagaaaaccctgtacaacaggagaaccagacaggacgagcctgctctgtttgtggccctgaccttcgagagaagagaggtgctggacagcagcaacatcaagcccatgaacctgatcggcgtggaccggggcgagaatatccctgctgtgatcgccctgacagaccctgaaggatgcccactgagcagattcaaggactccctgggcaaccctacacacatcctgagaatcggcgagagctacaaagagaagcagaggacaatccaggccaagaaagaggtggaacagcgcagagccggcggatactctaggaagtacgccagcaaggccaagaatctggccgacgacatggtccgaaacaccgccagagatctgctgtactacgccgtgacacaggacgccatgctgatcttcgagaatctgagcagaggcttcggccggcagggcaagagaacctttatggccgagaggcagtacaccagaatggaagattggctcacagctaaactggcctacgagggactgagcaagacctacctgtccaaaacactggcccagtatacctccaagacctgcagcaattgcggcttcaccatcaccagcgccgactacgacagagtgctggaaaagctcaagaaaaccgccaccggctggatgaccaccatcaacggcaaagagctgaaggttgagggccagatcacctactacaacaggtacaagaggcagaacgtcgtgaaggatctgagcgtggaactggacagactgagcgaagagagcgtgaacaacgacatcagcagctggacaaagggcagatcaggcgaggctctgagcctgctgaagaagaggtttagccacagacctgtgcaagagaagttcgtgtgcctgaactgcggcttcgagacacacgccgatgaacaggctgccctgaacattgccagaagctggctgttcctgagaagccaagagtacaagaagtaccagaccaacaagaccaccggcaacaccgacaagagggcctttgtggaaacctggcagagcttctacagaaaaaagctgaaagaagtctggaagcccgccgtgggctcccccgccgcgaagcgagtgaaactggactaagaattcctagagctcgctgatcagcctcgactgtgccttctagttgccagccatctgttgtttgcccctcccccgtgccttccttgaccctggaaggtgccactcccactgtcctttcctaataaaatgaggaaattgcatcgcattgtctgagtaggtgtcattctattctggggggtggggtggggcaggacagcaagggggaggattgggaagagaatagcaggcatgctggggaggtaccgtggcggccgcaggaacccctagtgatggagttggccactccctctctgcgcgctcgctcgctcactgaggccgggcgaccaaaggtcgcccgacgcccgggctttgcccgggcggcctcagtgagcgagcgagcgcgcagctgcctgcagg

SEQ ID NO: 4141 - DNA, 4355 bp, synthetic construct
  source 1..4355: mol_type = other DNA
cctgcaggcagctgcgcgctcgctcgctcactgaggccgcccgggcgtcgggcgacctttggtcgcccggcctcagtgagcgagcgagcgcgcagagagggagtggccaactccatcactaggggttcctgcggcctctagactcgaggcgttggcctccgcgccgggttttggcgcctcccgcgggcgcccccctcctcacggcgagcgctgccacgtcagacgaagggcgcagcgagcgtcctgatccttccgcccggacgctcaggacagcggcccgctgctcataagactcggccttagaaccccagtatcagcagaaggacattttaggacgggacttgggtgactctagggcactggttttctttccagagagcggaacaggcgaggaaaagtagtcccttctcggcgattctgcggagggatctccgtggggcggtgaacgccgatgattatataaggacgcgccgggtgtggcacagctagttccgtcgcagccgggatttgggtcgcggttcttgtttgtggatcgctgtgatcgtcacttggtctctggctaactaccggtgccaccatggccccagcggccaaacgggtgaagctggactctagacaagagatcaagagaatcaacaagatcagaaggagactggtcaaggacagcaacacaaagaaggccggcaagacaggccccatgaaaaccctgctcgtcagagtgatgacccctgacctgagagagcggctggaaaacctgagaaagaagcccgagaacatccctcagcctatcagcaacaccagcagggccaacctgaacaagctgctgaccgactacaccgagatgaagaaagccatcctgcacgtgtactgggaagagttccagaaagaccccgtgggcctgatgagcagagttgctcagcctgccagcaagaagatcgaccagaacaagctgaagcccgagatggacgagaagggcaatctgaccacagccggctttgcctgctctcagtgtggccagcctctgttcgtgtacaagctggaacaggtgtccgagaaaggcaaggcctacaccaactacttcggcagatgtaacgtggccgagcacgagaagctgattctgctggcccagctgaaacctgagaaggactctgatgaggccgtgacctacagcctgggcaagtttggacagagagccctggacttctacagcatccacgtgaccaaagaaagcacacaccccgtgaagcccctggctcagatcgccggcaatagatacgcctctggacctgtgggcaaagccctgtccgatgcctgcatgggaacaatcgccagcttcctgagcaagtaccaggacatcatcatcgagcaccagaaggtggtcaagggcaaccagaagagactggaaagcctgagggagctggccggcaaagagaacctggaataccccagcgtgaccctgcctcctcagcctcacacaaaagaaggcgtggacgcctacaacgaagtgatcgccagagtgagaatgtgggtcaacctgaacctgtggcagaagctgaaactgtccagggacgacgccaagcctctgctgagactgaagggcttccctagcttccctctggtggaaagacaggccaatgaagtggattggtgggacatggtctgcaacgtgaagaagctgatcaacgagaagaaagaggatggcaaggttttctggcagaacctggccggctacaagagacaagaagccctgaggccttacctgagcagcgaagaggaccggaagaagggcaagaagttcgccagataccagctgggcgacctgctgctgcacctggaaaagaagcacggcgaggactggggcaaagtgtacgatgaggcctgggagagaatcgacaagaaggtggaaggcctgagcaagcacattaagctggaagaggaaagaaggagcgaggacgcccaatctaaagccgctctgaccgattggctgagagccaaggccagctttgtgatcgagggcctgaaagaggccgacaaggacgagttctgcagatgcgagctgaagctgcagaagtggtacggcgatctgagaggcaagcccttcgccattgaggccgagaacagcatcctggacatcagcggcttcagcaagcagtacaactgcgccttcatttggcagaaagacggcgtcaagaaactgaacctgtacctgatcatcaattacttcaaaggcggcaagctgcggttcaagaagatcaaacccgaggccttcgaggctaacagattctacaccgtgatcaacaaaaagtccggcgagatcgtgcccatggaagtgaacttcaacttcgacgaccccaacctgattatcctgcctctggccttcggcaagagacagggcagagagttcatctggaacgatctgctgagcctggaaaccggctctctgaagctggccaatggcagagtgatcgagaaaaccctgtacaacaggagaaccagacaggacgagcctgctctgtttgtggccctgaccttcgagagaagagaggtgctggacagcagcaacatcaagcccatgaacctgatcggcgtggaccggggcgagaatatccctgctgtgatcgccctgacagaccctgaaggatgcccactgagcagattcaaggactccctgggcaaccctacacacatcctgagaatcggcgagagctacaaagagaagcagaggacaatccaggccaagaaagaggtggaacagcgcagagccggcggatactctaggaagtacgccagcaaggccaagaatctggccgacgacatggtccgaaacaccgccagagatctgctgtactacgccgtgacacaggacgccatgctgatcttcgagaatctgagcagaggcttcggccggcagggcaagagaacctttatggccgagaggcagtacaccagaatggaagattggctcacagctaaactggcctacgagggactgagcaagacctacctgtccaaaacactggcccagtatacctccaagacctgcagcaattgcggcttcaccatcaccagcgccgactacgacagagtgctggaaaagctcaagaaaaccgccaccggctggatgaccaccatcaacggcaaagagctgaaggttgagggccagatcacctactacaacaggtacaagaggcagaacgtcgtgaaggatctgagcgtggaactggacagactgagcgaagagagcgtgaacaacgacatcagcagctggacaaagggcagatcaggcgaggctctgagcctgctgaagaagaggtttagccacagacctgtgcaagagaagttcgtgtgcctgaactgcggcttcgagacacacgccgatgaacaggctgccctgaacattgccagaagctggctgttcctgagaagccaagagtacaagaagtaccagaccaacaagaccaccggcaacaccgacaagagggcctttgtggaaacctggcagagcttctacagaaaaaagctgaaagaagtctggaagcccgccgtgggatccccagccgcgaagcgagtgaaactggactaagaattcctagagctcgctgatcagcctcgactgtgccttctagttgccagccatctgttgtttgcccctcccccgtgccttccttgaccctggaaggtgccactcccactgtcctttcctaataaaatgaggaaattgcatcgcattgtctgagtaggtgtcattctattctggggggtggggtggggcaggacagcaagggggaggattgggaagagaatagcaggcatgctggggaggtaccgtgagggcctatttcccatgattccttcatatttgcatatacgatacaaggctgttagagagataattggaattaatttgactgtaaacacaaagatattagtacaaaatacgtgacgtagaaagtaataatttcttgggtagtttgcagttttaaaattatgttttaaaatggactatcatatgcttaccgtaacttgaaagtatttcgatttcttggctttatatatcttgtggaaaggacgaaacaccactggcgcttctatctgattactctgagcgccatcaccagcgactatgtcgtagtgggtaaagccgcttacggacttcggtccgtaagaggcatcagagagaagatgggcgggagtcttttttttttggcggccgcaggaacccctagtgatggagttggccactccctctctgcgcgctcgctcgctcactgaggccgggcgaccaaaggtcgcccgacgcccgggctttgcccgggcggcctcagtgagcgagcgagcgcgcagctgcctgcagg

SEQ ID NO: 4142 - DNA, 4379 bp, synthetic construct
  source 1..4379: mol_type = other DNA
cctgcaggcagctgcgcgctcgctcgctcactgaggccgcccgggcgtcgggcgacctttggtcgcccggcctcagtgagcgagcgagcgcgcagagagggagtggccaactccatcactaggggttcctgcggcctctagactcgaggcgttggcctccgcgccgggttttggcgcctcccgcgggcgcccccctcctcacggcgagcgctgccacgtcagacgaagggcgcagcgagcgtcctgatccttccgcccggacgctcaggacagcggcccgctgctcataagactcggccttagaaccccagtatcagcagaaggacattttaggacgggacttgggtgactctagggcactggttttctttccagagagcggaacaggcgaggaaaagtagtcccttctcggcgattctgcggagggatctccgtggggcggtgaacgccgatgattatataaggacgcgccgggtgtggcacagctagttccgtcgcagccgggatttgggtcgcggttcttgtttgtggatcgctgtgatcgtcacttggtctctggctaactaccggtatcaagaagatgggcgggagtcttgccaccatggccccagcggccaaacgggtgaagctggactctagacaagagatcaagagaatcaacaagatcagaaggagactggtcaaggacagcaacacaaagaaggccggcaagacaggccccatgaaaaccctgctcgtcagagtgatgacccctgacctgagagagcggctggaaaacctgagaaagaagcccgagaacatccctcagcctatcagcaacaccagcagggccaacctgaacaagctgctgaccgactacaccgagatgaagaaagccatcctgcacgtgtactgggaagagttccagaaagaccccgtgggcctgatgagcagagttgctcagcctgccagcaagaagatcgaccagaacaagctgaagcccgagatggacgagaagggcaatctgaccacagccggctttgcctgctctcagtgtggccagcctctgttcgtgtacaagctggaacaggtgtccgagaaaggcaaggcctacaccaactacttcggcagatgtaacgtggccgagcacgagaagctgattctgctggcccagctgaaacctgagaaggactctgatgaggccgtgacctacagcctgggcaagtttggacagagagccctggacttctacagcatccacgtgaccaaagaaagcacacaccccgtgaagcccctggctcagatcgccggcaatagatacgcctctggacctgtgggcaaagccctgtccgatgcctgcatgggaacaatcgccagcttcctgagcaagtaccaggacatcatcatcgagcaccagaaggtggtcaagggcaaccagaagagactggaaagcctgagggagctggccggcaaagagaacctggaataccccagcgtgaccctgcctcctcagcctcacacaaaagaaggcgtggacgcctacaacgaagtgatcgccagagtgagaatgtgggtcaacctgaacctgtggcagaagctgaaactgtccagggacgacgccaagcctctgctgagactgaagggcttccctagcttccctctggtggaaagacaggccaatgaagtggattggtgggacatggtctgcaacgtgaagaagctgatcaacgagaagaaagaggatggcaaggttttctggcagaacctggccggctacaagagacaagaagccctgaggccttacctgagcagcgaagaggaccggaagaagggcaagaagttcgccagataccagctgggcgacctgctgctgcacctggaaaagaagcacggcgaggactggggcaaagtgtacgatgaggcctgggagagaatcgacaagaaggtggaaggcctgagcaagcacattaagctggaagaggaaagaaggagcgaggacgcccaatctaaagccgctctgaccgattggctgagagccaaggccagctttgtgatcgagggcctgaaagaggccgacaaggacgagttctgcagatgcgagctgaagctgcagaagtggtacggcgatctgagaggcaagcccttcgccattgaggccgagaacagcatcctggacatcagcggcttcagcaagcagtacaactgcgccttcatttggcagaaagacggcgtcaagaaactgaacctgtacctgatcatcaattacttcaaaggcggcaagctgcggttcaagaagatcaaacccgaggccttcgaggctaacagattctacaccgtgatcaacaaaaagtccggcgagatcgtgcccatggaagtgaacttcaacttcgacgaccccaacctgattatcctgcctctggccttcggcaagagacagggcagagagttcatctggaacgatctgctgagcctggaaaccggctctctgaagctggccaatggcagagtgatcgagaaaaccctgtacaacaggagaaccagacaggacgagcctgctctgtttgtggccctgaccttcgagagaagagaggtgctggacagcagcaacatcaagcccatgaacctgatcggcgtggaccggggcgagaatatccctgctgtgatcgccctgacagaccctgaaggatgcccactgagcagattcaaggactccctgggcaaccctacacacatcctgagaatcggcgagagctacaaagagaagcagaggacaatccaggccaagaaagaggtggaacagcgcagagccggcggatactctaggaagtacgccagcaaggccaagaatctggccgacgacatggtccgaaacaccgccagagatctgctgtactacgccgtgacacaggacgccatgctgatcttcgagaatctgagcagaggcttcggccggcagggcaagagaacctttatggccgagaggcagtacaccagaatggaagattggctcacagctaaactggcctacgagggactgagcaagacctacctgtccaaaacactggcccagtatacctccaagacctgcagcaattgcggcttcaccatcaccagcgccgactacgacagagtgctggaaaagctcaagaaaaccgccaccggctggatgaccaccatcaacggcaaagagctgaaggttgagggccagatcacctactacaacaggtacaagaggcagaacgtcgtgaaggatctgagcgtggaactggacagactgagcgaagagagcgtgaacaacgacatcagcagctggacaaagggcagatcaggcgaggctctgagcctgctgaagaagaggtttagccacagacctgtgcaagagaagttcgtgtgcctgaactgcggcttcgagacacacgccgatgaacaggctgccctgaacattgccagaagctggctgttcctgagaagccaagagtacaagaagtaccagaccaacaagaccaccggcaacaccgacaagagggcctttgtggaaacctggcagagcttctacagaaaaaagctgaaagaagtctggaagcccgccgtgggatccccagccgcgaagcgagtgaaactggactaagaattcctagagctcgctgatcagcctcgactgtgccttctagttgccagccatctgttgtttgcccctcccccgtgccttccttgaccctggaaggtgccactcccactgtcctttcctaataaaatgaggaaattgcatcgcattgtctgagtaggtgtcattctattctggggggtggggtggggcaggacagcaagggggaggattgggaagagaatagcaggcatgctggggaggtaccgtgagggcctatttcccatgattccttcatatttgcatatacgatacaaggctgttagagagataattggaattaatttgactgtaaacacaaagatattagtacaaaatacgtgacgtagaaagtaataatttcttgggtagtttgcagttttaaaattatgttttaaaatggactatcatatgcttaccgtaacttgaaagtatttcgatttcttggctttatatatcttgtggaaaggacgaaacaccactggcgcttctatctgattactctgagcgccatcaccagcgactatgtcgtagtgggtaaagccgcttacggacttcggtccgtaagaggcatcagagagaagatgggcgggagtcttttttttttggcggccgcaggaacccctagtgatggagttggccactccctctctgcgcgctcgctcgctcactgaggccgggcgaccaaaggtcgcccgacgcccgggctttgcccgggcggcctcagtgagcgagcgagcgcgcagctgcctgcagg

SEQ ID NO: 4143 - DNA, 4379 bp, synthetic construct
  source 1..4379: mol_type = other DNA
cctgcaggcagctgcgcgctcgctcgctcactgaggccgcccgggcgtcgggcgacctttggtcgcccggcctcagtgagcgagcgagcgcgcagagagggagtggccaactccatcactaggggttcctgcggcctctagactcgaggcgttggcctccgcgccgggttttggcgcctcccgcgggcgcccccctcctcacggcgagcgctgccacgtcagacgaagggcgcagcgagcgtcctgatccttccgcccggacgctcaggacagcggcccgctgctcataagactcggccttagaaccccagtatcagcagaaggacattttaggacgggacttgggtgactctagggcactggttttctttccagagagcggaacaggcgaggaaaagtagtcccttctcggcgattctgcggagggatctccgtggggcggtgaacgccgatgattatataaggacgcgccgggtgtggcacagctagttccgtcgcagccgggatttgggtcgcggttcttgtttgtggatcgctgtgatcgtcacttggtctctggctaactaccggtctcaagaagatgggcgggagtcttgccaccatggccccagcggccaaacgggtgaagctggactctagacaagagatcaagagaatcaacaagatcagaaggagactggtcaaggacagcaacacaaagaaggccggcaagacaggccccatgaaaaccctgctcgtcagagtgatgacccctgacctgagagagcggctggaaaacctgagaaagaagcccgagaacatccctcagcctatcagcaacaccagcagggccaacctgaacaagctgctgaccgactacaccgagatgaagaaagccatcctgcacgtgtactgggaagagttccagaaagaccccgtgggcctgatgagcagagttgctcagcctgccagcaagaagatcgaccagaacaagctgaagcccgagatggacgagaagggcaatctgaccacagccggctttgcctgctctcagtgtggccagcctctgttcgtgtacaagctggaacaggtgtccgagaaaggcaaggcctacaccaactacttcggcagatgtaacgtggccgagcacgagaagctgattctgctggcccagctgaaacctgagaaggactctgatgaggccgtgacctacagcctgggcaagtttggacagagagccctggacttctacagcatccacgtgaccaaagaaagcacacaccccgtgaagcccctggctcagatcgccggcaatagatacgcctctggacctgtgggcaaagccctgtccgatgcctgcatgggaacaatcgccagcttcctgagcaagtaccaggacatcatcatcgagcaccagaaggtggtcaagggcaaccagaagagactggaaagcctgagggagctggccggcaaagagaacctggaataccccagcgtgaccctgcctcctcagcctcacacaaaagaaggcgtggacgcctacaacgaagtgatcgccagagtgagaatgtgggtcaacctgaacctgtggcagaagctgaaactgtccagggacgacgccaagcctctgctgagactgaagggcttccctagcttccctctggtggaaagacaggccaatgaagtggattggtgggacatggtctgcaacgtgaagaagctgatcaacgagaagaaagaggatggcaaggttttctggcagaacctggccggctacaagagacaagaagccctgaggccttacctgagcagcgaagaggaccggaagaagggcaagaagttcgccagataccagctgggcgacctgctgctgcacctggaaaagaagcacggcgaggactggggcaaagtgtacgatgaggcctgggagagaatcgacaagaaggtggaaggcctgagcaagcacattaagctggaagaggaaagaaggagcgaggacgcccaatctaaagccgctctgaccgattggctgagagccaaggccagctttgtgatcgagggcctgaaagaggccgacaaggacgagttctgcagatgcgagctgaagctgcagaagtggtacggcgatctgagaggcaagcccttcgccattgaggccgagaacagcatcctggacatcagcggcttcagcaagcagtacaactgcgccttcatttggcagaaagacggcgtcaagaaactgaacctgtacctgatcatcaattacttcaaaggcggcaagctgcggttcaagaagatcaaacccgaggccttcgaggctaacagattctacaccgtgatcaacaaaaagtccggcgagatcgtgcccatggaagtgaacttcaacttcgacgaccccaacctgattatcctgcctctggccttcggcaagagacagggcagagagttcatctggaacgatctgctgagcctggaaaccggctctctgaagctggccaatggcagagtgatcgagaaaaccctgtacaacaggagaaccagacaggacgagcctgctctgtttgtggccctgaccttcgagagaagagaggtgctggacagcagcaacatcaagcccatgaacctgatcggcgtggaccggggcgagaatatccctgctgtgatcgccctgacagaccctgaaggatgcccactgagcagattcaaggactccctgggcaaccctacacacatcctgagaatcggcgagagctacaaagagaagcagaggacaatccaggccaagaaagaggtggaacagcgcagagccggcggatactctaggaagtacgccagcaaggccaagaatctggccgacgacatggtccgaaacaccgccagagatctgctgtactacgccgtgacacaggacgccatgctgatcttcgagaatctgagcagaggcttcggccggcagggcaagagaacctttatggccgagaggcagtacaccagaatggaagattggctcacagctaaactggcctacgagggactgagcaagacctacctgtccaaaacactggcccagtatacctccaagacctgcagcaattgcggcttcaccatcaccagcgccgactacgacagagtgctggaaaagctcaagaaaaccgccaccggctggatgaccaccatcaacggcaaagagctgaaggttgagggccagatcacctactacaacaggtacaagaggcagaacgtcgtgaaggatctgagcgtggaactggacagactgagcgaagagagcgtgaacaacgacatcagcagctggacaaagggcagatcaggcgaggctctgagcctgctgaagaagaggtttagccacagacctgtgcaagagaagttcgtgtgcctgaactgcggcttcgagacacacgccgatgaacaggctgccctgaacattgccagaagctggctgttcctgagaagccaagagtacaagaagtaccagaccaacaagaccaccggcaacaccgacaagagggcctttgtggaaacctggcagagcttctacagaaaaaagctgaaagaagtctggaagcccgccgtgggatccccagccgcgaagcgagtgaaactggactaagaattcctagagctcgctgatcagcctcgactgtgccttctagttgccagccatctgttgtttgcccctcccccgtgccttccttgaccctggaaggtgccactcccactgtcctttcctaataaaatgaggaaattgcatcgcattgtctgagtaggtgtcattctattctggggggtggggtggggcaggacagcaagggggaggattgggaagagaatagcaggcatgctggggaggtaccgtgagggcctatttcccatgattccttcatatttgcatatacgatacaaggctgttagagagataattggaattaatttgactgtaaacacaaagatattagtacaaaatacgtgacgtagaaagtaataatttcttgggtagtttgcagttttaaaattatgttttaaaatggactatcatatgcttaccgtaacttgaaagtatttcgatttcttggctttatatatcttgtggaaaggacgaaacaccactggcgcttctatctgattactctgagcgccatcaccagcgactatgtcgtagtgggtaaagccgcttacggacttcggtccgtaagaggcatcagagagaagatgggcgggagtcttttttttttggcggccgcaggaacccctagtgatggagttggccactccctctctgcgcgctcgctcgctcactgaggccgggcgaccaaaggtcgcccgacgcccgggctttgcccgggcggcctcagtgagcgagcgagcgcgcagctgcctgcagg

SEQ ID NO: 4144 - DNA, 4379 bp, synthetic construct
  source 1..4379: mol_type = other DNA
cctgcaggcagctgcgcgctcgctcgctcactgaggccgcccgggcgtcgggcgacctttggtcgcccggcctcagtgagcgagcgagcgcgcagagagggagtggccaactccatcactaggggttcctgcggcctctagactcgaggcgttggcctccgcgccgggttttggcgcctcccgcgggcgcccccctcctcacggcgagcgctgccacgtcagacgaagggcgcagcgagcgtcctgatccttccgcccggacgctcaggacagcggcccgctgctcataagactcggccttagaaccccagtatcagcagaaggacattttaggacgggacttgggtgactctagggcactggttttctttccagagagcggaacaggcgaggaaaagtagtcccttctcggcgattctgcggagggatctccgtggggcggtgaacgccgatgattatataaggacgcgccgggtgtggcacagctagttccgtcgcagccgggatttgggtcgcggttcttgtttgtggatcgctgtgatcgtcacttggtctctggctaactaccggtgtcaagaagatgggcgggagtcttgccaccatggccccagcggccaaacgggtgaagctggactctagacaagagatcaagagaatcaacaagatcagaaggagactggtcaaggacagcaacacaaagaaggccggcaagacaggccccatgaaaaccctgctcgtcagagtgatgacccctgacctgagagagcggctggaaaacctgagaaagaagcccgagaacatccctcagcctatcagcaacaccagcagggccaacctgaacaagctgctgaccgactacaccgagatgaagaaagccatcctgcacgtgtactgggaagagttccagaaagaccccgtgggcctgatgagcagagttgctcagcctgccagcaagaagatcgaccagaacaagctgaagcccgagatggacgagaagggcaatctgaccacagccggctttgcctgctctcagtgtggccagcctctgttcgtgtacaagctggaacaggtgtccgagaaaggcaaggcctacaccaactacttcggcagatgtaacgtggccgagcacgagaagctgattctgctggcccagctgaaacctgagaaggactctgatgaggccgtgacctacagcctgggcaagtttggacagagagccctggacttctacagcatccacgtgaccaaagaaagcacacaccccgtgaagcccctggctcagatcgccggcaatagatacgcctctggacctgtgggcaaagccctgtccgatgcctgcatgggaacaatcgccagcttcctgagcaagtaccaggacatcatcatcgagcaccagaaggtggtcaagggcaaccagaagagactggaaagcctgagggagctggccggcaaagagaacctggaataccccagcgtgaccctgcctcctcagcctcacacaaaagaaggcgtggacgcctacaacgaagtgatcgccagagtgagaatgtgggtcaacctgaacctgtggcagaagctgaaactgtccagggacgacgccaagcctctgctgagactgaagggcttccctagcttccctctggtggaaagacaggccaatgaagtggattggtgggacatggtctgcaacgtgaagaagctgatcaacgagaagaaagaggatggcaaggttttctggcagaacctggccggctacaagagacaagaagccctgaggccttacctgagcagcgaagaggaccggaagaagggcaagaagttcgccagataccagctgggcgacctgctgctgcacctggaaaagaagcacggcgaggactggggcaaagtgtacgatgaggcctgggagagaatcgacaagaaggtggaaggcctgagcaagcacattaagctggaagaggaaagaaggagcgaggacgcccaatctaaagccgctctgaccgattggctgagagccaaggccagctttgtgatcgagggcctgaaagaggccgacaaggacgagttctgcagatgcgagctgaagctgcagaagtggtacggcgatctgagaggcaagcccttcgccattgaggccgagaacagcatcctggacatcagcggcttcagcaagcagtacaactgcgccttcatttggcagaaagacggcgtcaagaaactgaacctgtacctgatcatcaattacttcaaaggcggcaagctgcggttcaagaagatcaaacccgaggccttcgaggctaacagattctacaccgtgatcaacaaaaagtccggcgagatcgtgcccatggaagtgaacttcaacttcgacgaccccaacctgattatcctgcctctggccttcggcaagagacagggcagagagttcatctggaacgatctgctgagcctggaaaccggctctctgaagctggccaatggcagagtgatcgagaaaaccctgtacaacaggagaaccagacaggacgagcctgctctgtttgtggccctgaccttcgagagaagagaggtgctggacagcagcaacatcaagcccatgaacctgatcggcgtggaccggggcgagaatatccctgctgtgatcgccctgacagaccctgaaggatgcccactgagcagattcaaggactccctgggcaaccctacacacatcctgagaatcggcgagagctacaaagagaagcagaggacaatccaggccaagaaagaggtggaacagcgcagagccggcggatactctaggaagtacgccagcaaggccaagaatctggccgacgacatggtccgaaacaccgccagagatctgctgtactacgccgtgacacaggacgccatgctgatcttcgagaatctgagcagaggcttcggccggcagggcaagagaacctttatggccgagaggcagtacaccagaatggaagattggctcacagctaaactggcctacgagggactgagcaagacctacctgtccaaaacactggcccagtatacctccaagacctgcagcaattgcggcttcaccatcaccagcgccgactacgacagagtgctggaaaagctcaagaaaaccgccaccggctggatgaccaccatcaacggcaaagagctgaaggttgagggccagatcacctactacaacaggtacaagaggcagaacgtcgtgaaggatctgagcgtggaactggacagactgagcgaagagagcgtgaacaacgacatcagcagctggacaaagggcagatcaggcgaggctctgagcctgctgaagaagaggtttagccacagacctgtgcaagagaagttcgtgtgcctgaactgcggcttcgagacacacgccgatgaacaggctgccctgaacattgccagaagctggctgttcctgagaagccaagagtacaagaagtaccagaccaacaagaccaccggcaacaccgacaagagggcctttgtggaaacctggcagagcttctacagaaaaaagctgaaagaagtctggaagcccgccgtgggatccccagccgcgaagcgagtgaaactggactaagaattcctagagctcgctgatcagcctcgactgtgccttctagttgccagccatctgttgtttgcccctcccccgtgccttccttgaccctggaaggtgccactcccactgtcctttcctaataaaatgaggaaattgcatcgcattgtctgagtaggtgtcattctattctggggggtggggtggggcaggacagcaagggggaggattgggaagagaatagcaggcatgctggggaggtaccgtgagggcctatttcccatgattccttcatatttgcatatacgatacaaggctgttagagagataattggaattaatttgactgtaaacacaaagatattagtacaaaatacgtgacgtagaaagtaataatttcttgggtagtttgcagttttaaaattatgttttaaaatggactatcatatgcttaccgtaacttgaaagtatttcgatttcttggctttatatatcttgtggaaaggacgaaacaccactggcgcttctatctgattactctgagcgccatcaccagcgactatgtcgtagtgggtaaagccgcttacggacttcggtccgtaagaggcatcagagagaagatgggcgggagtcttttttttttggcggccgcaggaacccctagtgatggagttggccactccctctctgcgcgctcgctcgctcactgaggccgggcgaccaaaggtcgcccgacgcccgggctttgcccgggcggcctcagtgagcgagcgagcgcgcagctgcctgcagg

SEQ ID NO: 4145 - DNA, 4408 bp, synthetic construct
  source 1..4408: mol_type = other DNA
cctgcaggcagctgcgcgctcgctcgctcactgaggccgcccgggcgtcgggcgacctttggtcgcccggcctcagtgagcgagcgagcgcgcagagagggagtggccaactccatcactaggggttcctgcggcctctagactcgaggcgttggcctccgcgccgggttttggcgcctcccgcgggcgcccccctcctcacggcgagcgctgccacgtcagacgaagggcgcagcgagcgtcctgatccttccgcccggacgctcaggacagcggcccgctgctcataagactcggccttagaaccccagtatcagcagaaggacattttaggacgggacttgggtgactctagggcactggttttctttccagagagcggaacaggcgaggaaaagtagtcccttctcggcgattctgcggagggatctccgtggggcggtgaacgccgatgattatataaggacgcgccgggtgtggcacagctagttccgtcgcagccgggatttgggtcgcggttcttgtttgtggatcgctgtgatcgtcacttggtctctggctaactaccggtatcaagaagatgggcgggagtcttgccaccatggccccagcggccaaacgggtgaagctggactctagacaagagatcaagagaatcaacaagatcagaaggagactggtcaaggacagcaacacaaagaaggccggcaagacaggccccatgaaaaccctgctcgtcagagtgatgacccctgacctgagagagcggctggaaaacctgagaaagaagcccgagaacatccctcagcctatcagcaacaccagcagggccaacctgaacaagctgctgaccgactacaccgagatgaagaaagccatcctgcacgtgtactgggaagagttccagaaagaccccgtgggcctgatgagcagagttgctcagcctgccagcaagaagatcgaccagaacaagctgaagcccgagatggacgagaagggcaatctgaccacagccggctttgcctgctctcagtgtggccagcctctgttcgtgtacaagctggaacaggtgtccgagaaaggcaaggcctacaccaactacttcggcagatgtaacgtggccgagcacgagaagctgattctgctggcccagctgaaacctgagaaggactctgatgaggccgtgacctacagcctgggcaagtttggacagagagccctggacttctacagcatccacgtgaccaaagaaagcacacaccccgtgaagcccctggctcagatcgccggcaatagatacgcctctggacctgtgggcaaagccctgtccgatgcctgcatgggaacaatcgccagcttcctgagcaagtaccaggacatcatcatcgagcaccagaaggtggtcaagggcaaccagaagagactggaaagcctgagggagctggccggcaaagagaacctggaataccccagcgtgaccctgcctcctcagcctcacacaaaagaaggcgtggacgcctacaacgaagtgatcgccagagtgagaatgtgggtcaacctgaacctgtggcagaagctgaaactgtccagggacgacgccaagcctctgctgagactgaagggcttccctagcttccctctggtggaaagacaggccaatgaagtggattggtgggacatggtctgcaacgtgaagaagctgatcaacgagaagaaagaggatggcaaggttttctggcagaacctggccggctacaagagacaagaagccctgaggccttacctgagcagcgaagaggaccggaagaagggcaagaagttcgccagataccagctgggcgacctgctgctgcacctggaaaagaagcacggcgaggactggggcaaagtgtacgatgaggcctgggagagaatcgacaagaaggtggaaggcctgagcaagcacattaagctggaagaggaaagaaggagcgaggacgcccaatctaaagccgctctgaccgattggctgagagccaaggccagctttgtgatcgagggcctgaaagaggccgacaaggacgagttctgcagatgcgagctgaagctgcagaagtggtacggcgatctgagaggcaagcccttcgccattgaggccgagaacagcatcctggacatcagcggcttcagcaagcagtacaactgcgccttcatttggcagaaagacggcgtcaagaaactgaacctgtacctgatcatcaattacttcaaaggcggcaagctgcggttcaagaagatcaaacccgaggccttcgaggctaacagattctacaccgtgatcaacaaaaagtccggcgagatcgtgcccatggaagtgaacttcaacttcgacgaccccaacctgattatcctgcctctggccttcggcaagagacagggcagagagttcatctggaacgatctgctgagcctggaaaccggctctctgaagctggccaatggcagagtgatcgagaaaaccctgtacaacaggagaaccagacaggacgagcctgctctgtttgtggccctgaccttcgagagaagagaggtgctggacagcagcaacatcaagcccatgaacctgatcggcgtggaccggggcgagaatatccctgctgtgatcgccctgacagaccctgaaggatgcccactgagcagattcaaggactccctgggcaaccctacacacatcctgagaatcggcgagagctacaaagagaagcagaggacaatccaggccaagaaagaggtggaacagcgcagagccggcggatactctaggaagtacgccagcaaggccaagaatctggccgacgacatggtccgaaacaccgccagagatctgctgtactacgccgtgacacaggacgccatgctgatcttcgagaatctgagcagaggcttcggccggcagggcaagagaacctttatggccgagaggcagtacaccagaatggaagattggctcacagctaaactggcctacgagggactgagcaagacctacctgtccaaaacactggcccagtatacctccaagacctgcagcaattgcggcttcaccatcaccagcgccgactacgacagagtgctggaaaagctcaagaaaaccgccaccggctggatgaccaccatcaacggcaaagagctgaaggttgagggccagatcacctactacaacaggtacaagaggcagaacgtcgtgaaggatctgagcgtggaactggacagactgagcgaagagagcgtgaacaacgacatcagcagctggacaaagggcagatcaggcgaggctctgagcctgctgaagaagaggtttagccacagacctgtgcaagagaagttcgtgtgcctgaactgcggcttcgagacacacgccgatgaacaggctgccctgaacattgccagaagctggctgttcctgagaagccaagagtacaagaagtaccagaccaacaagaccaccggcaacaccgacaagagggcctttgtggaaacctggcagagcttctacagaaaaaagctgaaagaagtctggaagcccgccgtgggatccccagccgcgaagcgagtgaaactggactaagaattcctagagcttatcaagaagatgggcgggagtcttagctcgctgatcagcctcgactgtgccttctagttgccagccatctgttgtttgcccctcccccgtgccttccttgaccctggaaggtgccactcccactgtcctttcctaataaaatgaggaaattgcatcgcattgtctgagtaggtgtcattctattctggggggtggggtggggcaggacagcaagggggaggattgggaagagaatagcaggcatgctggggaggtaccgtgagggcctatttcccatgattccttcatatttgcatatacgatacaaggctgttagagagataattggaattaatttgactgtaaacacaaagatattagtacaaaatacgtgacgtagaaagtaataatttcttgggtagtttgcagttttaaaattatgttttaaaatggactatcatatgcttaccgtaacttgaaagtatttcgatttcttggctttatatatcttgtggaaaggacgaaacaccactggcgcttctatctgattactctgagcgccatcaccagcgactatgtcgtagtgggtaaagccgcttacggacttcggtccgtaagaggcatcagagagaagatgggcgggagtcttttttttttggcggccgcaggaacccctagtgatggagttggccactccctctctgcgcgctcgctcgctcactgaggccgggcgaccaaaggtcgcccgacgcccgggctttgcccgggcggcctcagtgagcgagcgagcgcgcagctgcctgcagg

SEQ ID NO: 4146 - DNA, 4408 bp, synthetic construct
  source 1..4408: mol_type = other DNA
cctgcaggcagctgcgcgctcgctcgctcactgaggccgcccgggcgtcgggcgacctttggtcgcccggcctcagtgagcgagcgagcgcgcagagagggagtggccaactccatcactaggggttcctgcggcctctagactcgaggcgttggcctccgcgccgggttttggcgcctcccgcgggcgcccccctcctcacggcgagcgctgccacgtcagacgaagggcgcagcgagcgtcctgatccttccgcccggacgctcaggacagcggcccgctgctcataagactcggccttagaaccccagtatcagcagaaggacattttaggacgggacttgggtgactctagggcactggttttctttccagagagcggaacaggcgaggaaaagtagtcccttctcggcgattctgcggagggatctccgtggggcggtgaacgccgatgattatataaggacgcgccgggtgtggcacagctagttccgtcgcagccgggatttgggtcgcggttcttgtttgtggatcgctgtgatcgtcacttggtctctggctaactaccggtctcaagaagatgggcgggagtcttgccaccatggccccagcggccaaacgggtgaagctggactctagacaagagatcaagagaatcaacaagatcagaaggagactggtcaaggacagcaacacaaagaaggccggcaagacaggccccatgaaaaccctgctcgtcagagtgatgacccctgacctgagagagcggctggaaaacctgagaaagaagcccgagaacatccctcagcctatcagcaacaccagcagggccaacctgaacaagctgctgaccgactacaccgagatgaagaaagccatcctgcacgtgtactgggaagagttccagaaagaccccgtgggcctgatgagcagagttgctcagcctgccagcaagaagatcgaccagaacaagctgaagcccgagatggacgagaagggcaatctgaccacagccggctttgcctgctctcagtgtggccagcctctgttcgtgtacaagctggaacaggtgtccgagaaaggcaaggcctacaccaactacttcggcagatgtaacgtggccgagcacgagaagctgattctgctggcccagctgaaacctgagaaggactctgatgaggccgtgacctacagcctgggcaagtttggacagagagccctggacttctacagcatccacgtgaccaaagaaagcacacaccccgtgaagcccctggctcagatcgccggcaatagatacgcctctggacctgtgggcaaagccctgtccgatgcctgcatgggaacaatcgccagcttcctgagcaagtaccaggacatcatcatcgagcaccagaaggtggtcaagggcaaccagaagagactggaaagcctgagggagctggccggcaaagagaacctggaataccccagcgtgaccctgcctcctcagcctcacacaaaagaaggcgtggacgcctacaacgaagtgatcgccagagtgagaatgtgggtcaacctgaacctgtggcagaagctgaaactgtccagggacgacgccaagcctctgctgagactgaagggcttccctagcttccctctggtggaaagacaggccaatgaagtggattggtgggacatggtctgcaacgtgaagaagctgatcaacgagaagaaagaggatggcaaggttttctggcagaacctggccggctacaagagacaagaagccctgaggccttacctgagcagcgaagaggaccggaagaagggcaagaagttcgccagataccagctgggcgacctgctgctgcacctggaaaagaagcacggcgaggactggggcaaagtgtacgatgaggcctgggagagaatcgacaagaaggtggaaggcctgagcaagcacattaagctggaagaggaaagaaggagcgaggacgcccaatctaaagccgctctgaccgattggctgagagccaaggccagctttgtgatcgagggcctgaaagaggccgacaaggacgagttctgcagatgcgagctgaagctgcagaagtggtacggcgatctgagaggcaagcccttcgccattgaggccgagaacagcatcctggacatcagcggcttcagcaagcagtacaactgcgccttcatttggcagaaagacggcgtcaagaaactgaacctgtacctgatcatcaattacttcaaaggcggcaagctgcggttcaagaagatcaaacccgaggccttcgaggctaacagattctacaccgtgatcaacaaaaagtccggcgagatcgtgcccatggaagtgaacttcaacttcgacgaccccaacctgattatcctgcctctggccttcggcaagagacagggcagagagttcatctggaacgatctgctgagcctggaaaccggctctctgaagctggccaatggcagagtgatcgagaaaaccctgtacaacaggagaaccagacaggacgagcctgctctgtttgtggccctgaccttcgagagaagagaggtgctggacagcagcaacatcaagcccatgaacctgatcggcgtggaccggggcgagaatatccctgctgtgatcgccctgacagaccctgaaggatgcccactgagcagattcaaggactccctgggcaaccctacacacatcctgagaatcggcgagagctacaaagagaagcagaggacaatccaggccaagaaagaggtggaacagcgcagagccggcggatactctaggaagtacgccagcaaggccaagaatctggccgacgacatggtccgaaacaccgccagagatctgctgtactacgccgtgacacaggacgccatgctgatcttcgagaatctgagcagaggcttcggccggcagggcaagagaacctttatggccgagaggcagtacaccagaatggaagattggctcacagctaaactggcctacgagggactgagcaagacctacctgtccaaaacactggcccagtatacctccaagacctgcagcaattgcggcttcaccatcaccagcgccgactacgacagagtgctggaaaagctcaagaaaaccgccaccggctggatgaccaccatcaacggcaaagagctgaaggttgagggccagatcacctactacaacaggtacaagaggcagaacgtcgtgaaggatctgagcgtggaactggacagactgagcgaagagagcgtgaacaacgacatcagcagctggacaaagggcagatcaggcgaggctctgagcctgctgaagaagaggtttagccacagacctgtgcaagagaagttcgtgtgcctgaactgcggcttcgagacacacgccgatgaacaggctgccctgaacattgccagaagctggctgttcctgagaagccaagagtacaagaagtaccagaccaacaagaccaccggcaacaccgacaagagggcctttgtggaaacctggcagagcttctacagaaaaaagctgaaagaagtctggaagcccgccgtgggatccccagccgcgaagcgagtgaaactggactaagaattcctagagcttctcaagaagatgggcgggagtcttagctcgctgatcagcctcgactgtgccttctagttgccagccatctgttgtttgcccctcccccgtgccttccttgaccctggaaggtgccactcccactgtcctttcctaataaaatgaggaaattgcatcgcattgtctgagtaggtgtcattctattctggggggtggggtggggcaggacagcaagggggaggattgggaagagaatagcaggcatgctggggaggtaccgtgagggcctatttcccatgattccttcatatttgcatatacgatacaaggctgttagagagataattggaattaatttgactgtaaacacaaagatattagtacaaaatacgtgacgtagaaagtaataatttcttgggtagtttgcagttttaaaattatgttttaaaatggactatcatatgcttaccgtaacttgaaagtatttcgatttcttggctttatatatcttgtggaaaggacgaaacaccactggcgcttctatctgattactctgagcgccatcaccagcgactatgtcgtagtgggtaaagccgcttacggacttcggtccgtaagaggcatcagagagaagatgggcgggagtcttttttttttggcggccgcaggaacccctagtgatggagttggccactccctctctgcgcgctcgctcgctcactgaggccgggcgaccaaaggtcgcccgacgcccgggctttgcccgggcggcctcagtgagcgagcgagcgcgcagctgcctgcagg

SEQ ID NO: 4147 - DNA, 4408 bp, synthetic construct
  source 1..4408: mol_type = other DNA
cctgcaggcagctgcgcgctcgctcgctcactgaggccgcccgggcgtcgggcgacctttggtcgcccggcctcagtgagcgagcgagcgcgcagagagggagtggccaactccatcactaggggttcctgcggcctctagactcgaggcgttggcctccgcgccgggttttggcgcctcccgcgggcgcccccctcctcacggcgagcgctgccacgtcagacgaagggcgcagcgagcgtcctgatccttccgcccggacgctcaggacagcggcccgctgctcataagactcggccttagaaccccagtatcagcagaaggacattttaggacgggacttgggtgactctagggcactggttttctttccagagagcggaacaggcgaggaaaagtagtcccttctcggcgattctgcggagggatctccgtggggcggtgaacgccgatgattatataaggacgcgccgggtgtggcacagctagttccgtcgcagccgggatttgggtcgcggttcttgtttgtggatcgctgtgatcgtcacttggtctctggctaactaccggtgtcaagaagatgggcgggagtcttgccaccatggccccagcggccaaacgggtgaagctggactctagacaagagatcaagagaatcaacaagatcagaaggagactggtcaaggacagcaacacaaagaaggccggcaagacaggccccatgaaaaccctgctcgtcagagtgatgacccctgacctgagagagcggctggaaaacctgagaaagaagcccgagaacatccctcagcctatcagcaacaccagcagggccaacctgaacaagctgctgaccgactacaccgagatgaagaaagccatcctgcacgtgtactgggaagagttccagaaagaccccgtgggcctgatgagcagagttgctcagcctgccagcaagaagatcgaccagaacaagctgaagcccgagatggacgagaagggcaatctgaccacagccggctttgcctgctctcagtgtggccagcctctgttcgtgtacaagctggaacaggtgtccgagaaaggcaaggcctacaccaactacttcggcagatgtaacgtggccgagcacgagaagctgattctgctggcccagctgaaacctgagaaggactctgatgaggccgtgacctacagcctgggcaagtttggacagagagccctggacttctacagcatccacgtgaccaaagaaagcacacaccccgtgaagcccctggctcagatcgccggcaatagatacgcctctggacctgtgggcaaagccctgtccgatgcctgcatgggaacaatcgccagcttcctgagcaagtaccaggacatcatcatcgagcaccagaaggtggtcaagggcaaccagaagagactggaaagcctgagggagctggccggcaaagagaacctggaataccccagcgtgaccctgcctcctcagcctcacacaaaagaaggcgtggacgcctacaacgaagtgatcgccagagtgagaatgtgggtcaacctgaacctgtggcagaagctgaaactgtccagggacgacgccaagcctctgctgagactgaagggcttccctagcttccctctggtggaaagacaggccaatgaagtggattggtgggacatggtctgcaacgtgaagaagctgatcaacgagaagaaagaggatggcaaggttttctggcagaacctggccggctacaagagacaagaagccctgaggccttacctgagcagcgaagaggaccggaagaagggcaagaagttcgccagataccagctgggcgacctgctgctgcacctggaaaagaagcacggcgaggactggggcaaagtgtacgatgaggcctgggagagaatcgacaagaaggtggaaggcctgagcaagcacattaagctggaagaggaaagaaggagcgaggacgcccaatctaaagccgctctgaccgattggctgagagccaaggccagctttgtgatcgagggcctgaaagaggccgacaaggacgagttctgcagatgcgagctgaagctgcagaagtggtacggcgatctgagaggcaagcccttcgccattgaggccgagaacagcatcctggacatcagcggcttcagcaagcagtacaactgcgccttcatttggcagaaagacggcgtcaagaaactgaacctgtacctgatcatcaattacttcaaaggcggcaagctgcggttcaagaagatcaaacccgaggccttcgaggctaacagattctacaccgtgatcaacaaaaagtccggcgagatcgtgcccatggaagtgaacttcaacttcgacgaccccaacctgattatcctgcctctggccttcggcaagagacagggcagagagttcatctggaacgatctgctgagcctggaaaccggctctctgaagctggccaatggcagagtgatcgagaaaaccctgtacaacaggagaaccagacaggacgagcctgctctgtttgtggccctgaccttcgagagaagagaggtgctggacagcagcaacatcaagcccatgaacctgatcggcgtggaccggggcgagaatatccctgctgtgatcgccctgacagaccctgaaggatgcccactgagcagattcaaggactccctgggcaaccctacacacatcctgagaatcggcgagagctacaaagagaagcagaggacaatccaggccaagaaagaggtggaacagcgcagagccggcggatactctaggaagtacgccagcaaggccaagaatctggccgacgacatggtccgaaacaccgccagagatctgctgtactacgccgtgacacaggacgccatgctgatcttcgagaatctgagcagaggcttcggccggcagggcaagagaacctttatggccgagaggcagtacaccagaatggaagattggctcacagctaaactggcctacgagggactgagcaagacctacctgtccaaaacactggcccagtatacctccaagacctgcagcaattgcggcttcaccatcaccagcgccgactacgacagagtgctggaaaagctcaagaaaaccgccaccggctggatgaccaccatcaacggcaaagagctgaaggttgagggccagatcacctactacaacaggtacaagaggcagaacgtcgtgaaggatctgagcgtggaactggacagactgagcgaagagagcgtgaacaacgacatcagcagctggacaaagggcagatcaggcgaggctctgagcctgctgaagaagaggtttagccacagacctgtgcaagagaagttcgtgtgcctgaactgcggcttcgagacacacgccgatgaacaggctgccctgaacattgccagaagctggctgttcctgagaagccaagagtacaagaagtaccagaccaacaagaccaccggcaacaccgacaagagggcctttgtggaaacctggcagagcttctacagaaaaaagctgaaagaagtctggaagcccgccgtgggatccccagccgcgaagcgagtgaaactggactaagaattcctagagcttgtcaagaagatgggcgggagtcttagctcgctgatcagcctcgactgtgccttctagttgccagccatctgttgtttgcccctcccccgtgccttccttgaccctggaaggtgccactcccactgtcctttcctaataaaatgaggaaattgcatcgcattgtctgagtaggtgtcattctattctggggggtggggtggggcaggacagcaagggggaggattgggaagagaatagcaggcatgctggggaggtaccgtgagggcctatttcccatgattccttcatatttgcatatacgatacaaggctgttagagagataattggaattaatttgactgtaaacacaaagatattagtacaaaatacgtgacgtagaaagtaataatttcttgggtagtttgcagttttaaaattatgttttaaaatggactatcatatgcttaccgtaacttgaaagtatttcgatttcttggctttatatatcttgtggaaaggacgaaacaccactggcgcttctatctgattactctgagcgccatcaccagcgactatgtcgtagtgggtaaagccgcttacggacttcggtccgtaagaggcatcagagagaagatgggcgggagtcttttttttttggcggccgcaggaacccctagtgatggagttggccactccctctctgcgcgctcgctcgctcactgaggccgggcgaccaaaggtcgcccgacgcccgggctttgcccgggcggcctcagtgagcgagcgagcgcgcagctgcctgcagg

SEQ ID NO: 4148 - DNA, 4379 bp, synthetic construct
  source 1..4379: mol_type = other DNA
cctgcaggcagctgcgcgctcgctcgctcactgaggccgcccgggcgtcgggcgacctttggtcgcccggcctcagtgagcgagcgagcgcgcagagagggagtggccaactccatcactaggggttcctgcggcctctagactcgaggcgttggcctccgcgccgggttttggcgcctcccgcgggcgcccccctcctcacggcgagcgctgccacgtcagacgaagggcgcagcgagcgtcctgatccttccgcccggacgctcaggacagcggcccgctgctcataagactcggccttagaaccccagtatcagcagaaggacattttaggacgggacttgggtgactctagggcactggttttctttccagagagcggaacaggcgaggaaaagtagtcccttctcggcgattctgcggagggatctccgtggggcggtgaacgccgatgattatataaggacgcgccgggtgtggcacagctagttccgtcgcagccgggatttgggtcgcggttcttgtttgtggatcgctgtgatcgtcacttggtctctggctaactaccggtatcaagaagatgggcgggagtcttgccaccatggccccagcggccaaacgggtgaagctggactctagacaagagatcaagagaatcaacaagatcagaaggagactggtcaaggacagcaacacaaagaaggccggcaagacaggccccatgaaaaccctgctcgtcagagtgatgacccctgacctgagagagcggctggaaaacctgagaaagaagcccgagaacatccctcagcctatcagcaacaccagcagggccaacctgaacaagctgctgaccgactacaccgagatgaagaaagccatcctgcacgtgtactgggaagagttccagaaagaccccgtgggcctgatgagcagagttgctcagcctgccagcaagaagatcgaccagaacaagctgaagcccgagatggacgagaagggcaatctgaccacagccggctttgcctgctctcagtgtggccagcctctgttcgtgtacaagctggaacaggtgtccgagaaaggcaaggcctacaccaactacttcggcagatgtaacgtggccgagcacgagaagctgattctgctggcccagctgaaacctgagaaggactctgatgaggccgtgacctacagcctgggcaagtttggacagagagccctggacttctacagcatccacgtgaccaaagaaagcacacaccccgtgaagcccctggctcagatcgccggcaatagatacgcctctggacctgtgggcaaagccctgtccgatgcctgcatgggaacaatcgccagcttcctgagcaagtaccaggacatcatcatcgagcaccagaaggtggtcaagggcaaccagaagagactggaaagcctgagggagctggccggcaaagagaacctggaataccccagcgtgaccctgcctcctcagcctcacacaaaagaaggcgtggacgcctacaacgaagtgatcgccagagtgagaatgtgggtcaacctgaacctgtggcagaagctgaaactgtccagggacgacgccaagcctctgctgagactgaagggcttccctagcttccctctggtggaaagacaggccaatgaagtggattggtgggacatggtctgcaacgtgaagaagctgatcaacgagaagaaagaggatggcaaggttttctggcagaacctggccggctacaagagacaagaagccctgaggccttacctgagcagcgaagaggaccggaagaagggcaagaagttcgccagataccagctgggcgacctgctgctgcacctggaaaagaagcacggcgaggactggggcaaagtgtacgatgaggcctgggagagaatcgacaagaaggtggaaggcctgagcaagcacattaagctggaagaggaaagaaggagcgaggacgcccaatctaaagccgctctgaccgattggctgagagccaaggccagctttgtgatcgagggcctgaaagaggccgacaaggacgagttctgcagatgcgagctgaagctgcagaagtggtacggcgatctgagaggcaagcccttcgccattgaggccgagaacagcatcctggacatcagcggcttcagcaagcagtacaactgcgccttcatttggcagaaagacggcgtcaagaaactgaacctgtacctgatcatcaattacttcaaaggcggcaagctgcggttcaagaagatcaaacccgaggccttcgaggctaacagattctacaccgtgatcaacaaaaagtccggcgagatcgtgcccatggaagtgaacttcaacttcgacgaccccaacctgattatcctgcctctggccttcggcaagagacagggcagagagttcatctggaacgatctgctgagcctggaaaccggctctctgaagctggccaatggcagagtgatcgagaaaaccctgtacaacaggagaaccagacaggacgagcctgctctgtttgtggccctgaccttcgagagaagagaggtgctggacagcagcaacatcaagcccatgaacctgatcggcgtggaccggggcgagaatatccctgctgtgatcgccctgacagaccctgaaggatgcccactgagcagattcaaggactccctgggcaaccctacacacatcctgagaatcggcgagagctacaaagagaagcagaggacaatccaggccaagaaagaggtggaacagcgcagagccggcggatactctaggaagtacgccagcaaggccaagaatctggccgacgacatggtccgaaacaccgccagagatctgctgtactacgccgtgacacaggacgccatgctgatcttcgagaatctgagcagaggcttcggccggcagggcaagagaacctttatggccgagaggcagtacaccagaatggaagattggctcacagctaaactggcctacgagggactgagcaagacctacctgtccaaaacactggcccagtatacctccaagacctgcagcaattgcggcttcaccatcaccagcgccgactacgacagagtgctggaaaagctcaagaaaaccgccaccggctggatgaccaccatcaacggcaaagagctgaaggttgagggccagatcacctactacaacaggtacaagaggcagaacgtcgtgaaggatctgagcgtggaactggacagactgagcgaagagagcgtgaacaacgacatcagcagctggacaaagggcagatcaggcgaggctctgagcctgctgaagaagaggtttagccacagacctgtgcaagagaagttcgtgtgcctgaactgcggcttcgagacacacgccgatgaacaggctgccctgaacattgccagaagctggctgttcctgagaagccaagagtacaagaagtaccagaccaacaagaccaccggcaacaccgacaagagggcctttgtggaaacctggcagagcttctacagaaaaaagctgaaagaagtctggaagcccgccgtgggatccccagccgcgaagcgagtgaaactggactaagaattcctagagctcgctgatcagcctcgactgtgccttctagttgccagccatctgttgtttgcccctcccccgtgccttccttgaccctggaaggtgccactcccactgtcctttcctaataaaatgaggaaattgcatcgcattgtctgagtaggtgtcattctattctggggggtggggtggggcaggacagcaagggggaggattgggaagagaatagcaggcatgctggggaggtaccgtgagggcctatttcccatgattccttcatatttgcatatacgatacaaggctgttagagagataattggaattaatttgactgtaaacacaaagatattagtacaaaatacgtgacgtagaaagtaataatttcttgggtagtttgcagttttaaaattatgttttaaaatggactatcatatgcttaccgtaacttgaaagtatttcgatttcttggctttatatatcttgtggaaaggacgaaacaccactggcgcttctatctgattactctgagcgccatcaccagcgactatgtcgtagtgggtaaagccgcttacggacttcggtccgtaagaggcatcagagcaagaggagaagcagtttggttttttttggcggccgcaggaacccctagtgatggagttggccactccctctctgcgcgctcgctcgctcactgaggccgggcgaccaaaggtcgcccgacgcccgggctttgcccgggcggcctcagtgagcgagcgagcgcgcagctgcctgcagg

SEQ ID NO: 4149 - DNA, 4408 bp, synthetic construct
  source 1..4408: mol_type = other DNA
cctgcaggcagctgcgcgctcgctcgctcactgaggccgcccgggcgtcgggcgacctttggtcgcccggcctcagtgagcgagcgagcgcgcagagagggagtggccaactccatcactaggggttcctgcggcctctagactcgaggcgttggcctccgcgccgggttttggcgcctcccgcgggcgcccccctcctcacggcgagcgctgccacgtcagacgaagggcgcagcgagcgtcctgatccttccgcccggacgctcaggacagcggcccgctgctcataagactcggccttagaaccccagtatcagcagaaggacattttaggacgggacttgggtgactctagggcactggttttctttccagagagcggaacaggcgaggaaaagtagtcccttctcggcgattctgcggagggatctccgtggggcggtgaacgccgatgattatataaggacgcgccgggtgtggcacagctagttccgtcgcagccgggatttgggtcgcggttcttgtttgtggatcgctgtgatcgtcacttggtctctggctaactaccggtatcaagaagatgggcgggagtcttgccaccatggccccagcggccaaacgggtgaagctggactctagacaagagatcaagagaatcaacaagatcagaaggagactggtcaaggacagcaacacaaagaaggccggcaagacaggccccatgaaaaccctgctcgtcagagtgatgacccctgacctgagagagcggctggaaaacctgagaaagaagcccgagaacatccctcagcctatcagcaacaccagcagggccaacctgaacaagctgctgaccgactacaccgagatgaagaaagccatcctgcacgtgtactgggaagagttccagaaagaccccgtgggcctgatgagcagagttgctcagcctgccagcaagaagatcgaccagaacaagctgaagcccgagatggacgagaagggcaatctgaccacagccggctttgcctgctctcagtgtggccagcctctgttcgtgtacaagctggaacaggtgtccgagaaaggcaaggcctacaccaactacttcggcagatgtaacgtggccgagcacgagaagctgattctgctggcccagctgaaacctgagaaggactctgatgaggccgtgacctacagcctgggcaagtttggacagagagccctggacttctacagcatccacgtgaccaaagaaagcacacaccccgtgaagcccctggctcagatcgccggcaatagatacgcctctggacctgtgggcaaagccctgtccgatgcctgcatgggaacaatcgccagcttcctgagcaagtaccaggacatcatcatcgagcaccagaaggtggtcaagggcaaccagaagagactggaaagcctgagggagctggccggcaaagagaacctggaataccccagcgtgaccctgcctcctcagcctcacacaaaagaaggcgtggacgcctacaacgaagtgatcgccagagtgagaatgtgggtcaacctgaacctgtggcagaagctgaaactgtccagggacgacgccaagcctctgctgagactgaagggcttccctagcttccctctggtggaaagacaggccaatgaagtggattggtgggacatggtctgcaacgtgaagaagctgatcaacgagaagaaagaggatggcaaggttttctggcagaacctggccggctacaagagacaagaagccctgaggccttacctgagcagcgaagaggaccggaagaagggcaagaagttcgccagataccagctgggcgacctgctgctgcacctggaaaagaagcacggcgaggactggggcaaagtgtacgatgaggcctgggagagaatcgacaagaaggtggaaggcctgagcaagcacattaagctggaagaggaaagaaggagcgaggacgcccaatctaaagccgctctgaccgattggctgagagccaaggccagctttgtgatcgagggcctgaaagaggccgacaaggacgagttctgcagatgcgagctgaagctgcagaagtggtacggcgatctgagaggcaagcccttcgccattgaggccgagaacagcatcctggacatcagcggcttcagcaagcagtacaactgcgccttcatttggcagaaagacggcgtcaagaaactgaacctgtacctgatcatcaattacttcaaaggcggcaagctgcggttcaagaagatcaaacccgaggccttcgaggctaacagattctacaccgtgatcaacaaaaagtccggcgagatcgtgcccatggaagtgaacttcaacttcgacgaccccaacctgattatcctgcctctggccttcggcaagagacagggcagagagttcatctggaacgatctgctgagcctggaaaccggctctctgaagctggccaatggcagagtgatcgagaaaaccctgtacaacaggagaaccagacaggacgagcctgctctgtttgtggccctgaccttcgagagaagagaggtgctggacagcagcaacatcaagcccatgaacctgatcggcgtggaccggggcgagaatatccctgctgtgatcgccctgacagaccctgaaggatgcccactgagcagattcaaggactccctgggcaaccctacacacatcctgagaatcggcgagagctacaaagagaagcagaggacaatccaggccaagaaagaggtggaacagcgcagagccggcggatactctaggaagtacgccagcaaggccaagaatctggccgacgacatggtccgaaacaccgccagagatctgctgtactacgccgtgacacaggacgccatgctgatcttcgagaatctgagcagaggcttcggccggcagggcaagagaacctttatggccgagaggcagtacaccagaatggaagattggctcacagctaaactggcctacgagggactgagcaagacctacctgtccaaaacactggcccagtatacctccaagacctgcagcaattgcggcttcaccatcaccagcgccgactacgacagagtgctggaaaagctcaagaaaaccgccaccggctggatgaccaccatcaacggcaaagagctgaaggttgagggccagatcacctactacaacaggtacaagaggcagaacgtcgtgaaggatctgagcgtggaactggacagactgagcgaagagagcgtgaacaacgacatcagcagctggacaaagggcagatcaggcgaggctctgagcctgctgaagaagaggtttagccacagacctgtgcaagagaagttcgtgtgcctgaactgcggcttcgagacacacgccgatgaacaggctgccctgaacattgccagaagctggctgttcctgagaagccaagagtacaagaagtaccagaccaacaagaccaccggcaacaccgacaagagggcctttgtggaaacctggcagagcttctacagaaaaaagctgaaagaagtctggaagcccgccgtgggatccccagccgcgaagcgagtgaaactggactaagaattcctagagcttatcaagaagatgggcgggagtcttagctcgctgatcagcctcgactgtgccttctagttgccagccatctgttgtttgcccctcccccgtgccttccttgaccctggaaggtgccactcccactgtcctttcctaataaaatgaggaaattgcatcgcattgtctgagtaggtgtcattctattctggggggtggggtggggcaggacagcaagggggaggattgggaagagaatagcaggcatgctggggaggtaccgtgagggcctatttcccatgattccttcatatttgcatatacgatacaaggctgttagagagataattggaattaatttgactgtaaacacaaagatattagtacaaaatacgtgacgtagaaagtaataatttcttgggtagtttgcagttttaaaattatgttttaaaatggactatcatatgcttaccgtaacttgaaagtatttcgatttcttggctttatatatcttgtggaaaggacgaaacaccactggcgcttctatctgattactctgagcgccatcaccagcgactatgtcgtagtgggtaaagccgcttacggacttcggtccgtaagaggcatcagagcaagaggagaagcagtttggttttttttggcggccgcaggaacccctagtgatggagttggccactccctctctgcgcgctcgctcgctcactgaggccgggcgaccaaaggtcgcccgacgcccgggctttgcccgggcggcctcagtgagcgagcgagcgcgcagctgcctgcagg

SEQ ID NO: 4150 - DNA, 4355 bp, synthetic construct
  source 1..4355: mol_type = other DNA
cctgcaggcagctgcgcgctcgctcgctcactgaggccgcccgggcgtcgggcgacctttggtcgcccggcctcagtgagcgagcgagcgcgcagagagggagtggccaactccatcactaggggttcctgcggcctctagactcgaggcgttggcctccgcgccgggttttggcgcctcccgcgggcgcccccctcctcacggcgagcgctgccacgtcagacgaagggcgcagcgagcgtcctgatccttccgcccggacgctcaggacagcggcccgctgctcataagactcggccttagaaccccagtatcagcagaaggacattttaggacgggacttgggtgactctagggcactggttttctttccagagagcggaacaggcgaggaaaagtagtcccttctcggcgattctgcggagggatctccgtggggcggtgaacgccgatgattatataaggacgcgccgggtgtggcacagctagttccgtcgcagccgggatttgggtcgcggttcttgtttgtggatcgctgtgatcgtcacttggtctctggctaactaccggtgccaccatggccccagcggccaaacgggtgaagctggactctagacaagagatcaagagaatcaacaagatcagaaggagactggtcaaggacagcaacacaaagaaggccggcaagacaggccccatgaaaaccctgctcgtcagagtgatgacccctgacctgagagagcggctggaaaacctgagaaagaagcccgagaacatccctcagcctatcagcaacaccagcagggccaacctgaacaagctgctgaccgactacaccgagatgaagaaagccatcctgcacgtgtactgggaagagttccagaaagaccccgtgggcctgatgagcagagttgctcagcctgccagcaagaagatcgaccagaacaagctgaagcccgagatggacgagaagggcaatctgaccacagccggctttgcctgctctcagtgtggccagcctctgttcgtgtacaagctggaacaggtgtccgagaaaggcaaggcctacaccaactacttcggcagatgtaacgtggccgagcacgagaagctgattctgctggcccagctgaaacctgagaaggactctgatgaggccgtgacctacagcctgggcaagtttggacagagagccctggacttctacagcatccacgtgaccaaagaaagcacacaccccgtgaagcccctggctcagatcgccggcaatagatacgcctctggacctgtgggcaaagccctgtccgatgcctgcatgggaacaatcgccagcttcctgagcaagtaccaggacatcatcatcgagcaccagaaggtggtcaagggcaaccagaagagactggaaagcctgagggagctggccggcaaagagaacctggaataccccagcgtgaccctgcctcctcagcctcacacaaaagaaggcgtggacgcctacaacgaagtgatcgccagagtgagaatgtgggtcaacctgaacctgtggcagaagctgaaactgtccagggacgacgccaagcctctgctgagactgaagggcttccctagcttccctctggtggaaagacaggccaatgaagtggattggtgggacatggtctgcaacgtgaagaagctgatcaacgagaagaaagaggatggcaaggttttctggcagaacctggccggctacaagagacaagaagccctgaggccttacctgagcagcgaagaggaccggaagaagggcaagaagttcgccagataccagctgggcgacctgctgctgcacctggaaaagaagcacggcgaggactggggcaaagtgtacgatgaggcctgggagagaatcgacaagaaggtggaaggcctgagcaagcacattaagctggaagaggaaagaaggagcgaggacgcccaatctaaagccgctctgaccgattggctgagagccaaggccagctttgtgatcgagggcctgaaagaggccgacaaggacgagttctgcagatgcgagctgaagctgcagaagtggtacggcgatctgagaggcaagcccttcgccattgaggccgagaacagcatcctggacatcagcggcttcagcaagcagtacaactgcgccttcatttggcagaaagacggcgtcaagaaactgaacctgtacctgatcatcaattacttcaaaggcggcaagctgcggttcaagaagatcaaacccgaggccttcgaggctaacagattctacaccgtgatcaacaaaaagtccggcgagatcgtgcccatggaagtgaacttcaacttcgacgaccccaacctgattatcctgcctctggccttcggcaagagacagggcagagagttcatctggaacgatctgctgagcctggaaaccggctctctgaagctggccaatggcagagtgatcgagaaaaccctgtacaacaggagaaccagacaggacgagcctgctctgtttgtggccctgaccttcgagagaagagaggtgctggacagcagcaacatcaagcccatgaacctgatcggcgtggaccggggcgagaatatccctgctgtgatcgccctgacagaccctgaaggatgcccactgagcagattcaaggactccctgggcaaccctacacacatcctgagaatcggcgagagctacaaagagaagcagaggacaatccaggccaagaaagaggtggaacagcgcagagccggcggatactctaggaagtacgccagcaaggccaagaatctggccgacgacatggtccgaaacaccgccagagatctgctgtactacgccgtgacacaggacgccatgctgatcttcgagaatctgagcagaggcttcggccggcagggcaagagaacctttatggccgagaggcagtacaccagaatggaagattggctcacagctaaactggcctacgagggactgagcaagacctacctgtccaaaacactggcccagtatacctccaagacctgcagcaattgcggcttcaccatcaccagcgccgactacgacagagtgctggaaaagctcaagaaaaccgccaccggctggatgaccaccatcaacggcaaagagctgaaggttgagggccagatcacctactacaacaggtacaagaggcagaacgtcgtgaaggatctgagcgtggaactggacagactgagcgaagagagcgtgaacaacgacatcagcagctggacaaagggcagatcaggcgaggctctgagcctgctgaagaagaggtttagccacagacctgtgcaagagaagttcgtgtgcctgaactgcggcttcgagacacacgccgatgaacaggctgccctgaacattgccagaagctggctgttcctgagaagccaagagtacaagaagtaccagaccaacaagaccaccggcaacaccgacaagagggcctttgtggaaacctggcagagcttctacagaaaaaagctgaaagaagtctggaagcccgccgtgggatccccagccgcgaagcgagtgaaactggactaagaattcctagagctcgctgatcagcctcgactgtgccttctagttgccagccatctgttgtttgcccctcccccgtgccttccttgaccctggaaggtgccactcccactgtcctttcctaataaaatgaggaaattgcatcgcattgtctgagtaggtgtcattctattctggggggtggggtggggcaggacagcaagggggaggattgggaagagaatagcaggcatgctggggaggtaccgtgagggcctatttcccatgattccttcatatttgcatatacgatacaaggctgttagagagataattggaattaatttgactgtaaacacaaagatattagtacaaaatacgtgacgtagaaagtaataatttcttgggtagtttgcagttttaaaattatgttttaaaatggactatcatatgcttaccgtaacttgaaagtatttcgatttcttggctttatatatcttgtggaaaggacgaaacaccactggcgcttctatctgattactctgagcgccatcaccagcgactatgtcgtagtgggtaaagccgcttacggacttcggtccgtaagaggcatcagagcaagaggagaagcagtttggttttttttggcggccgcaggaacccctagtgatggagttggccactccctctctgcgcgctcgctcgctcactgaggccgggcgaccaaaggtcgcccgacgcccgggctttgcccgggcggcctcagtgagcgagcgagcgcgcagctgcctgcagg

SEQ ID NO: 4151 - DNA, 4379 bp, synthetic construct
  source 1..4379: mol_type = other DNA
  variation 576..595: note = n is any nucleotide
  variation 4202..4221: note = n is any nucleotide
cctgcaggcagctgcgcgctcgctcgctcactgaggccgcccgggcgtcgggcgacctttggtcgcccggcctcagtgagcgagcgagcgcgcagagagggagtggccaactccatcactaggggttcctgcggcctctagactcgaggcgttggcctccgcgccgggttttggcgcctcccgcgggcgcccccctcctcacggcgagcgctgccacgtcagacgaagggcgcagcgagcgtcctgatccttccgcccggacgctcaggacagcggcccgctgctcataagactcggccttagaaccccagtatcagcagaaggacattttaggacgggacttgggtgactctagggcactggttttctttccagagagcggaacaggcgaggaaaagtagtcccttctcggcgattctgcggagggatctccgtggggcggtgaacgccgatgattatataaggacgcgccgggtgtggcacagctagttccgtcgcagccgggatttgggtcgcggttcttgtttgtggatcgctgtgatcgtcacttggtctctggctaactaccggtatcannnnnnnnnnnnnnnnnnnngccaccatggccccagcggccaaacgggtgaagctggactctagacaagagatcaagagaatcaacaagatcagaaggagactggtcaaggacagcaacacaaagaaggccggcaagacaggccccatgaaaaccctgctcgtcagagtgatgacccctgacctgagagagcggctggaaaacctgagaaagaagcccgagaacatccctcagcctatcagcaacaccagcagggccaacctgaacaagctgctgaccgactacaccgagatgaagaaagccatcctgcacgtgtactgggaagagttccagaaagaccccgtgggcctgatgagcagagttgctcagcctgccagcaagaagatcgaccagaacaagctgaagcccgagatggacgagaagggcaatctgaccacagccggctttgcctgctctcagtgtggccagcctctgttcgtgtacaagctggaacaggtgtccgagaaaggcaaggcctacaccaactacttcggcagatgtaacgtggccgagcacgagaagctgattctgctggcccagctgaaacctgagaaggactctgatgaggccgtgacctacagcctgggcaagtttggacagagagccctggacttctacagcatccacgtgaccaaagaaagcacacaccccgtgaagcccctggctcagatcgccggcaatagatacgcctctggacctgtgggcaaagccctgtccgatgcctgcatgggaacaatcgccagcttcctgagcaagtaccaggacatcatcatcgagcaccagaaggtggtcaagggcaaccagaagagactggaaagcctgagggagctggccggcaaagagaacctggaataccccagcgtgaccctgcctcctcagcctcacacaaaagaaggcgtggacgcctacaacgaagtgatcgccagagtgagaatgtgggtcaacctgaacctgtggcagaagctgaaactgtccagggacgacgccaagcctctgctgagactgaagggcttccctagcttccctctggtggaaagacaggccaatgaagtggattggtgggacatggtctgcaacgtgaagaagctgatcaacgagaagaaagaggatggcaaggttttctggcagaacctggccggctacaagagacaagaagccctgaggccttacctgagcagcgaagaggaccggaagaagggcaagaagttcgccagataccagctgggcgacctgctgctgcacctggaaaagaagcacggcgaggactggggcaaagtgtacgatgaggcctgggagagaatcgacaagaaggtggaaggcctgagcaagcacattaagctggaagaggaaagaaggagcgaggacgcccaatctaaagccgctctgaccgattggctgagagccaaggccagctttgtgatcgagggcctgaaagaggccgacaaggacgagttctgcagatgcgagctgaagctgcagaagtggtacggcgatctgagaggcaagcccttcgccattgaggccgagaacagcatcctggacatcagcggcttcagcaagcagtacaactgcgccttcatttggcagaaagacggcgtcaagaaactgaacctgtacctgatcatcaattacttcaaaggcggcaagctgcggttcaagaagatcaaacccgaggccttcgaggctaacagattctacaccgtgatcaacaaaaagtccggcgagatcgtgcccatggaagtgaacttcaacttcgacgaccccaacctgattatcctgcctctggccttcggcaagagacagggcagagagttcatctggaacgatctgctgagcctggaaaccggctctctgaagctggccaatggcagagtgatcgagaaaaccctgtacaacaggagaaccagacaggacgagcctgctctgtttgtggccctgaccttcgagagaagagaggtgctggacagcagcaacatcaagcccatgaacctgatcggcgtggaccggggcgagaatatccctgctgtgatcgccctgacagaccctgaaggatgcccactgagcagattcaaggactccctgggcaaccctacacacatcctgagaatcggcgagagctacaaagagaagcagaggacaatccaggccaagaaagaggtggaacagcgcagagccggcggatactctaggaagtacgccagcaaggccaagaatctggccgacgacatggtccgaaacaccgccagagatctgctgtactacgccgtgacacaggacgccatgctgatcttcgagaatctgagcagaggcttcggccggcagggcaagagaacctttatggccgagaggcagtacaccagaatggaagattggctcacagctaaactggcctacgagggactgagcaagacctacctgtccaaaacactggcccagtatacctccaagacctgcagcaattgcggcttcaccatcaccagcgccgactacgacagagtgctggaaaagctcaagaaaaccgccaccggctggatgaccaccatcaacggcaaagagctgaaggttgagggccagatcacctactacaacaggtacaagaggcagaacgtcgtgaaggatctgagcgtggaactggacagactgagcgaagagagcgtgaacaacgacatcagcagctggacaaagggcagatcaggcgaggctctgagcctgctgaagaagaggtttagccacagacctgtgcaagagaagttcgtgtgcctgaactgcggcttcgagacacacgccgatgaacaggctgccctgaacattgccagaagctggctgttcctgagaagccaagagtacaagaagtaccagaccaacaagaccaccggcaacaccgacaagagggcctttgtggaaacctggcagagcttctacagaaaaaagctgaaagaagtctggaagcccgccgtgggatccccagccgcgaagcgagtgaaactggactaagaattcctagagctcgctgatcagcctcgactgtgccttctagttgccagccatctgttgtttgcccctcccccgtgccttccttgaccctggaaggtgccactcccactgtcctttcctaataaaatgaggaaattgcatcgcattgtctgagtaggtgtcattctattctggggggtggggtggggcaggacagcaagggggaggattgggaagagaatagcaggcatgctggggaggtaccgtgagggcctatttcccatgattccttcatatttgcatatacgatacaaggctgttagagagataattggaattaatttgactgtaaacacaaagatattagtacaaaatacgtgacgtagaaagtaataatttcttgggtagtttgcagttttaaaattatgttttaaaatggactatcatatgcttaccgtaacttgaaagtatttcgatttcttggctttatatatcttgtggaaaggacgaaacaccactggcgcttctatctgattactctgagcgccatcaccagcgactatgtcgtagtgggtaaagccgcttacggacttcggtccgtaagaggcatcagagnnnnnnnnnnnnnnnnnnnnttttttttggcggccgcaggaacccctagtgatggagttggccactccctctctgcgcgctcgctcgctcactgaggccgggcgaccaaaggtcgcccgacgcccgggctttgcccgggcggcctcagtgagcgagcgagcgcgcagctgcctgcagg

SEQ ID NO: 4152 - DNA, 4379 bp, synthetic construct
  source 1..4379: mol_type = other DNA
  variation 576..595: note = n is any nucleotide
  variation 4202..4221: note = n is any nucleotide
cctgcaggcagctgcgcgctcgctcgctcactgaggccgcccgggcgtcgggcgacctttggtcgcccggcctcagtgagcgagcgagcgcgcagagagggagtggccaactccatcactaggggttcctgcggcctctagactcgaggcgttggcctccgcgccgggttttggcgcctcccgcgggcgcccccctcctcacggcgagcgctgccacgtcagacgaagggcgcagcgagcgtcctgatccttccgcccggacgctcaggacagcggcccgctgctcataagactcggccttagaaccccagtatcagcagaaggacattttaggacgggacttgggtgactctagggcactggttttctttccagagagcggaacaggcgaggaaaagtagtcccttctcggcgattctgcggagggatctccgtggggcggtgaacgccgatgattatataaggacgcgccgggtgtggcacagctagttccgtcgcagccgggatttgggtcgcggttcttgtttgtggatcgctgtgatcgtcacttggtctctggctaactaccggtctcannnnnnnnnnnnnnnnnnnngccaccatggccccagcggccaaacgggtgaagctggactctagacaagagatcaagagaatcaacaagatcagaaggagactggtcaaggacagcaacacaaagaaggccggcaagacaggccccatgaaaaccctgctcgtcagagtgatgacccctgacctgagagagcggctggaaaacctgagaaagaagcccgagaacatccctcagcctatcagcaacaccagcagggccaacctgaacaagctgctgaccgactacaccgagatgaagaaagccatcctgcacgtgtactgggaagagttccagaaagaccccgtgggcctgatgagcagagttgctcagcctgccagcaagaagatcgaccagaacaagctgaagcccgagatggacgagaagggcaatctgaccacagccggctttgcctgctctcagtgtggccagcctctgttcgtgtacaagctggaacaggtgtccgagaaaggcaaggcctacaccaactacttcggcagatgtaacgtggccgagcacgagaagctgattctgctggcccagctgaaacctgagaaggactctgatgaggccgtgacctacagcctgggcaagtttggacagagagccctggacttctacagcatccacgtgaccaaagaaagcacacaccccgtgaagcccctggctcagatcgccggcaatagatacgcctctggacctgtgggcaaagccctgtccgatgcctgcatgggaacaatcgccagcttcctgagcaagtaccaggacatcatcatcgagcaccagaaggtggtcaagggcaaccagaagagactggaaagcctgagggagctggccggcaaagagaacctggaataccccagcgtgaccctgcctcctcagcctcacacaaaagaaggcgtggacgcctacaacgaagtgatcgccagagtgagaatgtgggtcaacctgaacctgtggcagaagctgaaactgtccagggacgacgccaagcctctgctgagactgaagggcttccctagcttccctctggtggaaagacaggccaatgaagtggattggtgggacatggtctgcaacgtgaagaagctgatcaacgagaagaaagaggatggcaaggttttctggcagaacctggccggctacaagagacaagaagccctgaggccttacctgagcagcgaagaggaccggaagaagggcaagaagttcgccagataccagctgggcgacctgctgctgcacctggaaaagaagcacggcgaggactggggcaaagtgtacgatgaggcctgggagagaatcgacaagaaggtggaaggcctgagcaagcacattaagctggaagaggaaagaaggagcgaggacgcccaatctaaagccgctctgaccgattggctgagagccaaggccagctttgtgatcgagggcctgaaagaggccgacaaggacgagttctgcagatgcgagctgaagctgcagaagtggtacggcgatctgagaggcaagcccttcgccattgaggccgagaacagcatcctggacatcagcggcttcagcaagcagtacaactgcgccttcatttggcagaaagacggcgtcaagaaactgaacctgtacctgatcatcaattacttcaaaggcggcaagctgcggttcaagaagatcaaacccgaggccttcgaggctaacagattctacaccgtgatcaacaaaaagtccggcgagatcgtgcccatggaagtgaacttcaacttcgacgaccccaacctgattatcctgcctctggccttcggcaagagacagggcagagagttcatctggaacgatctgctgagcctggaaaccggctctctgaagctggccaatggcagagtgatcgagaaaaccctgtacaacaggagaaccagacaggacgagcctgctctgtttgtggccctgaccttcgagagaagagaggtgctggacagcagcaacatcaagcccatgaacctgatcggcgtggaccggggcgagaatatccctgctgtgatcgccctgacagaccctgaaggatgcccactgagcagattcaaggactccctgggcaaccctacacacatcctgagaatcggcgagagctacaaagagaagcagaggacaatccaggccaagaaagaggtggaacagcgcagagccggcggatactctaggaagtacgccagcaaggccaagaatctggccgacgacatggtccgaaacaccgccagagatctgctgtactacgccgtgacacaggacgccatgctgatcttcgagaatctgagcagaggcttcggccggcagggcaagagaacctttatggccgagaggcagtacaccagaatggaagattggctcacagctaaactggcctacgagggactgagcaagacctacctgtccaaaacactggcccagtatacctccaagacctgcagcaattgcggcttcaccatcaccagcgccgactacgacagagtgctggaaaagctcaagaaaaccgccaccggctggatgaccaccatcaacggcaaagagctgaaggttgagggccagatcacctactacaacaggtacaagaggcagaacgtcgtgaaggatctgagcgtggaactggacagactgagcgaagagagcgtgaacaacgacatcagcagctggacaaagggcagatcaggcgaggctctgagcctgctgaagaagaggtttagccacagacctgtgcaagagaagttcgtgtgcctgaactgcggcttcgagacacacgccgatgaacaggctgccctgaacattgccagaagctggctgttcctgagaagccaagagtacaagaagtaccagaccaacaagaccaccggcaacaccgacaagagggcctttgtggaaacctggcagagcttctacagaaaaaagctgaaagaagtctggaagcccgccgtgggatccccagccgcgaagcgagtgaaactggactaagaattcctagagctcgctgatcagcctcgactgtgccttctagttgccagccatctgttgtttgcccctcccccgtgccttccttgaccctggaaggtgccactcccactgtcctttcctaataaaatgaggaaattgcatcgcattgtctgagtaggtgtcattctattctggggggtggggtggggcaggacagcaagggggaggattgggaagagaatagcaggcatgctggggaggtaccgtgagggcctatttcccatgattccttcatatttgcatatacgatacaaggctgttagagagataattggaattaatttgactgtaaacacaaagatattagtacaaaatacgtgacgtagaaagtaataatttcttgggtagtttgcagttttaaaattatgttttaaaatggactatcatatgcttaccgtaacttgaaagtatttcgatttcttggctttatatatcttgtggaaaggacgaaacaccactggcgcttctatctgattactctgagcgccatcaccagcgactatgtcgtagtgggtaaagccgcttacggacttcggtccgtaagaggcatcagagnnnnnnnnnnnnnnnnnnnnttttttttggcggccgcaggaacccctagtgatggagttggccactccctctctgcgcgctcgctcgctcactgaggccgggcgaccaaaggtcgcccgacgcccgggctttgcccgggcggcctcagtgagcgagcgagcgcgcagctgcctgcagg

SEQ ID NO: 4153 - DNA, 4379 bp, synthetic construct
  source 1..4379: mol_type = other DNA
  variation 576..595: note = n is any nucleotide
  variation 4202..4221: note = n is any nucleotide
cctgcaggcagctgcgcgctcgctcgctcactgaggccgcccgggcgtcgggcgacctttggtcgcccggcctcagtgagcgagcgagcgcgcagagagggagtggccaactccatcactaggggttcctgcggcctctagactcgaggcgttggcctccgcgccgggttttggcgcctcccgcgggcgcccccctcctcacggcgagcgctgccacgtcagacgaagggcgcagcgagcgtcctgatccttccgcccggacgctcaggacagcggcccgctgctcataagactcggccttagaaccccagtatcagcagaaggacattttaggacgggacttgggtgactctagggcactggttttctttccagagagcggaacaggcgaggaaaagtagtcccttctcggcgattctgcggagggatctccgtggggcggtgaacgccgatgattatataaggacgcgccgggtgtggcacagctagttccgtcgcagccgggatttgggtcgcggttcttgtttgtggatcgctgtgatcgtcacttggtctctggctaactaccggtgtcannnnnnnnnnnnnnnnnnnngccaccatggccccagcggccaaacgggtgaagctggactctagacaagagatcaagagaatcaacaagatcagaaggagactggtcaaggacagcaacacaaagaaggccggcaagacaggccccatgaaaaccctgctcgtcagagtgatgacccctgacctgagagagcggctggaaaacctgagaaagaagcccgagaacatccctcagcctatcagcaacaccagcagggccaacctgaacaagctgctgaccgactacaccgagatgaagaaagccatcctgcacgtgtactgggaagagttccagaaagaccccgtgggcctgatgagcagagttgctcagcctgccagcaagaagatcgaccagaacaagctgaagcccgagatggacgagaagggcaatctgaccacagccggctttgcctgctctcagtgtggccagcctctgttcgtgtacaagctggaacaggtgtccgagaaaggcaaggcctacaccaactacttcggcagatgtaacgtggccgagcacgagaagctgattctgctggcccagctgaaacctgagaaggactctgatgaggccgtgacctacagcctgggcaagtttggacagagagccctggacttctacagcatccacgtgaccaaagaaagcacacaccccgtgaagcccctggctcagatcgccggcaatagatacgcctctggacctgtgggcaaagccctgtccgatgcctgcatgggaacaatcgccagcttcctgagcaagtaccaggacatcatcatcgagcaccagaaggtggtcaagggcaaccagaagagactggaaagcctgagggagctggccggcaaagagaacctggaataccccagcgtgaccctgcctcctcagcctcacacaaaagaaggcgtggacgcctacaacgaagtgatcgccagagtgagaatgtgggtcaacctgaacctgtggcagaagctgaaactgtccagggacgacgccaagcctctgctgagactgaagggcttccctagcttccctctggtggaaagacaggccaatgaagtggattggtgggacatggtctgcaacgtgaagaagctgatcaacgagaagaaagaggatggcaaggttttctggcagaacctggccggctacaagagacaagaagccctgaggccttacctgagcagcgaagaggaccggaagaagggcaagaagttcgccagataccagctgggcgacctgctgctgcacctggaaaagaagcacggcgaggactggggcaaagtgtacgatgaggcctgggagagaatcgacaagaaggtggaaggcctgagcaagcacattaagctggaagaggaaagaaggagcgaggacgcccaatctaaagccgctctgaccgattggctgagagccaaggccagctttgtgatcgagggcctgaaagaggccgacaaggacgagttctgcagatgcgagctgaagctgcagaagtggtacggcgatctgagaggcaagcccttcgccattgaggccgagaacagcatcctggacatcagcggcttcagcaagcagtacaactgcgccttcatttggcagaaagacggcgtcaagaaactgaacctgtacctgatcatcaattacttcaaaggcggcaagctgcggttcaagaagatcaaacccgaggccttcgaggctaacagattctacaccgtgatcaacaaaaagtccggcgagatcgtgcccatggaagtgaacttcaacttcgacgaccccaacctgattatcctgcctctggccttcggcaagagacagggcagagagttcatctggaacgatctgctgagcctggaaaccggctctctgaagctggccaatggcagagtgatcgagaaaaccctgtacaacaggagaaccagacaggacgagcctgctctgtttgtggccctgaccttcgagagaagagaggtgctggacagcagcaacatcaagcccatgaacctgatcggcgtggaccggggcgagaatatccctgctgtgatcgccctgacagaccctgaaggatgcccactgagcagattcaaggactccctgggcaaccctacacacatcctgagaatcggcgagagctacaaagagaagcagaggacaatccaggccaagaaagaggtggaacagcgcagagccggcggatactctaggaagtacgccagcaaggccaagaatctggccgacgacatggtccgaaacaccgccagagatctgctgtactacgccgtgacacaggacgccatgctgatcttcgagaatctgagcagaggcttcggccggcagggcaagagaacctttatggccgagaggcagtacaccagaatggaagattggctcacagctaaactggcctacgagggactgagcaagacctacctgtccaaaacactggcccagtatacctccaagacctgcagcaattgcggcttcaccatcaccagcgccgactacgacagagtgctggaaaagctcaagaaaaccgccaccggctggatgaccaccatcaacggcaaagagctgaaggttgagggccagatcacctactacaacaggtacaagaggcagaacgtcgtgaaggatctgagcgtggaactggacagactgagcgaagagagcgtgaacaacgacatcagcagctggacaaagggcagatcaggcgaggctctgagcctgctgaagaagaggtttagccacagacctgtgcaagagaagttcgtgtgcctgaactgcggcttcgagacacacgccgatgaacaggctgccctgaacattgccagaagctggctgttcctgagaagccaagagtacaagaagtaccagaccaacaagaccaccggcaacaccgacaagagggcctttgtggaaacctggcagagcttctacagaaaaaagctgaaagaagtctggaagcccgccgtgggatccccagccgcgaagcgagtgaaactggactaagaattcctagagctcgctgatcagcctcgactgtgccttctagttgccagccatctgttgtttgcccctcccccgtgccttccttgaccctggaaggtgccactcccactgtcctttcctaataaaatgaggaaattgcatcgcattgtctgagtaggtgtcattctattctggggggtggggtggggcaggacagcaagggggaggattgggaagagaatagcaggcatgctggggaggtaccgtgagggcctatttcccatgattccttcatatttgcatatacgatacaaggctgttagagagataattggaattaatttgactgtaaacacaaagatattagtacaaaatacgtgacgtagaaagtaataatttcttgggtagtttgcagttttaaaattatgttttaaaatggactatcatatgcttaccgtaacttgaaagtatttcgatttcttggctttatatatcttgtggaaaggacgaaacaccactggcgcttctatctgattactctgagcgccatcaccagcgactatgtcgtagtgggtaaagccgcttacggacttcggtccgtaagaggcatcagagnnnnnnnnnnnnnnnnnnnnttttttttggcggccgcaggaacccctagtgatggagttggccactccctctctgcgcgctcgctcgctcactgaggccgggcgaccaaaggtcgcccgacgcccgggctttgcccgggcggcctcagtgagcgagcgagcgcgcagctgcctgcagg

SEQ ID NO: 4154 - DNA, 4408 bp, synthetic construct
  source 1..4408: mol_type = other DNA
  variation 576..595: note = n is any nucleotide
  variation 3627..3646: note = n is any nucleotide
  variation 4231..4250: note = n is any nucleotide
cctgcaggcagctgcgcgctcgctcgctcactgaggccgcccgggcgtcgggcgacctttggtcgcccggcctcagtgagcgagcgagcgcgcagagagggagtggccaactccatcactaggggttcctgcggcctctagactcgaggcgttggcctccgcgccgggttttggcgcctcccgcgggcgcccccctcctcacggcgagcgctgccacgtcagacgaagggcgcagcgagcgtcctgatccttccgcccggacgctcaggacagcggcccgctgctcataagactcggccttagaaccccagtatcagcagaaggacattttaggacgggacttgggtgactctagggcactggttttctttccagagagcggaacaggcgaggaaaagtagtcccttctcggcgattctgcggagggatctccgtggggcggtgaacgccgatgattatataaggacgcgccgggtgtggcacagctagttccgtcgcagccgggatttgggtcgcggttcttgtttgtggatcgctgtgatcgtcacttggtctctggctaactaccggtatcannnnnnnnnnnnnnnnnnnngccaccatggccccagcggccaaacgggtgaagctggactctagacaagagatcaagagaatcaacaagatcagaaggagactggtcaaggacagcaacacaaagaaggccggcaagacaggccccatgaaaaccctgctcgtcagagtgatgacccctgacctgagagagcggctggaaaacctgagaaagaagcccgagaacatccctcagcctatcagcaacaccagcagggccaacctgaacaagctgctgaccgactacaccgagatgaagaaagccatcctgcacgtgtactgggaagagttccagaaagaccccgtgggcctgatgagcagagttgctcagcctgccagcaagaagatcgaccagaacaagctgaagcccgagatggacgagaagggcaatctgaccacagccggctttgcctgctctcagtgtggccagcctctgttcgtgtacaagctggaacaggtgtccgagaaaggcaaggcctacaccaactacttcggcagatgtaacgtggccgagcacgagaagctgattctgctggcccagctgaaacctgagaaggactctgatgaggccgtgacctacagcctgggcaagtttggacagagagccctggacttctacagcatccacgtgaccaaagaaagcacacaccccgtgaagcccctggctcagatcgccggcaatagatacgcctctggacctgtgggcaaagccctgtccgatgcctgcatgggaacaatcgccagcttcctgagcaagtaccaggacatcatcatcgagcaccagaaggtggtcaagggcaaccagaagagactggaaagcctgagggagctggccggcaaagagaacctggaataccccagcgtgaccctgcctcctcagcctcacacaaaagaaggcgtggacgcctacaacgaagtgatcgccagagtgagaatgtgggtcaacctgaacctgtggcagaagctgaaactgtccagggacgacgccaagcctctgctgagactgaagggcttccctagcttccctctggtggaaagacaggccaatgaagtggattggtgggacatggtctgcaacgtgaagaagctgatcaacgagaagaaagaggatggcaaggttttctggcagaacctggccggctacaagagacaagaagccctgaggccttacctgagcagcgaagaggaccggaagaagggcaagaagttcgccagataccagctgggcgacctgctgctgcacctggaaaagaagcacggcgaggactggggcaaagtgtacgatgaggcctgggagagaatcgacaagaaggtggaaggcctgagcaagcacattaagctggaagaggaaagaaggagcgaggacgcccaatctaaagccgctctgaccgattggctgagagccaaggccagctttgtgatcgagggcctgaaagaggccgacaaggacgagttctgcagatgcgagctgaagctgcagaagtggtacggcgatctgagaggcaagcccttcgccattgaggccgagaacagcatcctggacatcagcggcttcagcaagcagtacaactgcgccttcatttggcagaaagacggcgtcaagaaactgaacctgtacctgatcatcaattacttcaaaggcggcaagctgcggttcaagaagatcaaacccgaggccttcgaggctaacagattctacaccgtgatcaacaaaaagtccggcgagatcgtgcccatggaagtgaacttcaacttcgacgaccccaacctgattatcctgcctctggccttcggcaagagacagggcagagagttcatctggaacgatctgctgagcctggaaaccggctctctgaagctggccaatggcagagtgatcgagaaaaccctgtacaacaggagaaccagacaggacgagcctgctctgtttgtggccctgaccttcgagagaagagaggtgctggacagcagcaacatcaagcccatgaacctgatcggcgtggaccggggcgagaatatccctgctgtgatcgccctgacagaccctgaaggatgcccactgagcagattcaaggactccctgggcaaccctacacacatcctgagaatcggcgagagctacaaagagaagcagaggacaatccaggccaagaaagaggtggaacagcgcagagccggcggatactctaggaagtacgccagcaaggccaagaatctggccgacgacatggtccgaaacaccgccagagatctgctgtactacgccgtgacacaggacgccatgctgatcttcgagaatctgagcagaggcttcggccggcagggcaagagaacctttatggccgagaggcagtacaccagaatggaagattggctcacagctaaactggcctacgagggactgagcaagacctacctgtccaaaacactggcccagtatacctccaagacctgcagcaattgcggcttcaccatcaccagcgccgactacgacagagtgctggaaaagctcaagaaaaccgccaccggctggatgaccaccatcaacggcaaagagctgaaggttgagggccagatcacctactacaacaggtacaagaggcagaacgtcgtgaaggatctgagcgtggaactggacagactgagcgaagagagcgtgaacaacgacatcagcagctggacaaagggcagatcaggcgaggctctgagcctgctgaagaagaggtttagccacagacctgtgcaagagaagttcgtgtgcctgaactgcggcttcgagacacacgccgatgaacaggctgccctgaacattgccagaagctggctgttcctgagaagccaagagtacaagaagtaccagaccaacaagaccaccggcaacaccgacaagagggcctttgtggaaacctggcagagcttctacagaaaaaagctgaaagaagtctggaagcccgccgtgggatccccagccgcgaagcgagtgaaactggactaagaattcctagagcttatcannnnnnnnnnnnnnnnnnnnagctcgctgatcagcctcgactgtgccttctagttgccagccatctgttgtttgcccctcccccgtgccttccttgaccctggaaggtgccactcccactgtcctttcctaataaaatgaggaaattgcatcgcattgtctgagtaggtgtcattctattctggggggtggggtggggcaggacagcaagggggaggattgggaagagaatagcaggcatgctggggaggtaccgtgagggcctatttcccatgattccttcatatttgcatatacgatacaaggctgttagagagataattggaattaatttgactgtaaacacaaagatattagtacaaaatacgtgacgtagaaagtaataatttcttgggtagtttgcagttttaaaattatgttttaaaatggactatcatatgcttaccgtaacttgaaagtatttcgatttcttggctttatatatcttgtggaaaggacgaaacaccactggcgcttctatctgattactctgagcgccatcaccagcgactatgtcgtagtgggtaaagccgcttacggacttcggtccgtaagaggcatcagagnnnnnnnnnnnnnnnnnnnnttttttttggcggccgcaggaacccctagtgatggagttggccactccctctctgcgcgctcgctcgctcactgaggccgggcgaccaaaggtcgcccgacgcccgggctttgcccgggcggcctcagtgagcgagcgagcgcgcagctgcctgcagg

SEQ ID NO: 4155 - DNA, 4408 bp, synthetic construct
  source 1..4408: mol_type = other DNA
  variation 576..595: note = n is any nucleotide
  variation 3627..3646: note = n is any nucleotide
  variation 4231..4250: note = n is any nucleotide
cctgcaggcagctgcgcgctcgctcgctcactgaggccgcccgggcgtcgggcgacctttggtcgcccggcctcagtgagcgagcgagcgcgcagagagggagtggccaactccatcactaggggttcctgcggcctctagactcgaggcgttggcctccgcgccgggttttggcgcctcccgcgggcgcccccctcctcacggcgagcgctgccacgtcagacgaagggcgcagcgagcgtcctgatccttccgcccggacgctcaggacagcggcccgctgctcataagactcggccttagaaccccagtatcagcagaaggacattttaggacgggacttgggtgactctagggcactggttttctttccagagagcggaacaggcgaggaaaagtagtcccttctcggcgattctgcggagggatctccgtggggcggtgaacgccgatgattatataaggacgcgccgggtgtggcacagctagttccgtcgcagccgggatttgggtcgcggttcttgtttgtggatcgctgtgatcgtcacttggtctctggctaactaccggtctcannnnnnnnnnnnnnnnnnnngccaccatggccccagcggccaaacgggtgaagctggactctagacaagagatcaagagaatcaacaagatcagaaggagactggtcaaggacagcaacacaaagaaggccggcaagacaggccccatgaaaaccctgctcgtcagagtgatgacccctgacctgagagagcggctggaaaacctgagaaagaagcccgagaacatccctcagcctatcagcaacaccagcagggccaacctgaacaagctgctgaccgactacaccgagatgaagaaagccatcctgcacgtgtactgggaagagttccagaaagaccccgtgggcctgatgagcagagttgctcagcctgccagcaagaagatcgaccagaacaagctgaagcccgagatggacgagaagggcaatctgaccacagccggctttgcctgctctcagtgtggccagcctctgttcgtgtacaagctggaacaggtgtccgagaaaggcaaggcctacaccaactacttcggcagatgtaacgtggccgagcacgagaagctgattctgctggcccagctgaaacctgagaaggactctgatgaggccgtgacctacagcctgggcaagtttggacagagagccctggacttctacagcatccacgtgaccaaagaaagcacacaccccgtgaagcccctggctcagatcgccggcaatagatacgcctctggacctgtgggcaaagccctgtccgatgcctgcatgggaacaatcgccagcttcctgagcaagtaccaggacatcatcatcgagcaccagaaggtggtcaagggcaaccagaagagactggaaagcctgagggagctggccggcaaagagaacctggaataccccagcgtgaccctgcctcctcagcctcacacaaaagaaggcgtggacgcctacaacgaagtgatcgccagagtgagaatgtgggtcaacctgaacctgtggcagaagctgaaactgtccagggacgacgccaagcctctgctgagactgaagggcttccctagcttccctctggtggaaagacaggccaatgaagtggattggtgggacatggtctgcaacgtgaagaagctgatcaacgagaagaaagaggatggcaaggttttctggcagaacctggccggctacaagagacaagaagccctgaggccttacctgagcagcgaagaggaccggaagaagggcaagaagttcgccagataccagctgggcgacctgctgctgcacctggaaaagaagcacggcgaggactggggcaaagtgtacgatgaggcctgggagagaatcgacaagaaggtggaaggcctgagcaagcacattaagctggaagaggaaagaaggagcgaggacgcccaatctaaagccgctctgaccgattggctgagagccaaggccagctttgtgatcgagggcctgaaagaggccgacaaggacgagttctgcagatgcgagctgaagctgcagaagtggtacggcgatctgagaggcaagcccttcgccattgaggccgagaacagcatcctggacatcagcggcttcagcaagcagtacaactgcgccttcatttggcagaaagacggcgtcaagaaactgaacctgtacctgatcatcaattacttcaaaggcggcaagctgcggttcaagaagatcaaacccgaggccttcgaggctaacagattctacaccgtgatcaacaaaaagtccggcgagatcgtgcccatggaagtgaacttcaacttcgacgaccccaacctgattatcctgcctctggccttcggcaagagacagggcagagagttcatctggaacgatctgctgagcctggaaaccggctctctgaagctggccaatggcagagtgatcgagaaaaccctgtacaacaggagaaccagacaggacgagcctgctctgtttgtggccctgaccttcgagagaagagaggtgctggacagcagcaacatcaagcccatgaacctgatcggcgtggaccggggcgagaatatccctgctgtgatcgccctgacagaccctgaaggatgcccactgagcagattcaaggactccctgggcaaccctacacacatcctgagaatcggcgagagctacaaagagaagcagaggacaatccaggccaagaaagaggtggaacagcgcagagccggcggatactctaggaagtacgccagcaaggccaagaatctggccgacgacatggtccgaaacaccgccagagatctgctgtactacgccgtgacacaggacgccatgctgatcttcgagaatctgagcagaggcttcggccggcagggcaagagaacctttatggccgagaggcagtacaccagaatggaagattggctcacagctaaactggcctacgagggactgagcaagacctacctgtccaaaacactggcccagtatacctccaagacctgcagcaattgcggcttcaccatcaccagcgccgactacgacagagtgctggaaaagctcaagaaaaccgccaccggctggatgaccaccatcaacggcaaagagctgaaggttgagggccagatcacctactacaacaggtacaagaggcagaacgtcgtgaaggatctgagcgtggaactggacagactgagcgaagagagcgtgaacaacgacatcagcagctggacaaagggcagatcaggcgaggctctgagcctgctgaagaagaggtttagccacagacctgtgcaagagaagttcgtgtgcctgaactgcggcttcgagacacacgccgatgaacaggctgccctgaacattgccagaagctggctgttcctgagaagccaagagtacaagaagtaccagaccaacaagaccaccggcaacaccgacaagagggcctttgtggaaacctggcagagcttctacagaaaaaagctgaaagaagtctggaagcccgccgtgggatccccagccgcgaagcgagtgaaactggactaagaattcctagagcttctcannnnnnnnnnnnnnnnnnnnagctcgctgatcagcctcgactgtgccttctagttgccagccatctgttgtttgcccctcccccgtgccttccttgaccctggaaggtgccactcccactgtcctttcctaataaaatgaggaaattgcatcgcattgtctgagtaggtgtcattctattctggggggtggggtggggcaggacagcaagggggaggattgggaagagaatagcaggcatgctggggaggtaccgtgagggcctatttcccatgattccttcatatttgcatatacgatacaaggctgttagagagataattggaattaatttgactgtaaacacaaagatattagtacaaaatacgtgacgtagaaagtaataatttcttgggtagtttgcagttttaaaattatgttttaaaatggactatcatatgcttaccgtaacttgaaagtatttcgatttcttggctttatatatcttgtggaaaggacgaaacaccactggcgcttctatctgattactctgagcgccatcaccagcgactatgtcgtagtgggtaaagccgcttacggacttcggtccgtaagaggcatcagagnnnnnnnnnnnnnnnnnnnnttttttttggcggccgcaggaacccctagtgatggagttggccactccctctctgcgcgctcgctcgctcactgaggccgggcgaccaaaggtcgcccgacgcccgggctttgcccgggcggcctcagtgagcgagcgagcgcgcagctgcctgcagg

SEQ ID NO: 4156 - DNA, 4408 bp, synthetic construct
  source 1..4408: mol_type = other DNA
  variation 576..595: note = n is any nucleotide
  variation 3627..3646: note = n is any nucleotide
  variation 4231..4250: note = n is any nucleotide
cctgcaggcagctgcgcgctcgctcgctcactgaggccgcccgggcgtcgggcgacctttggtcgcccggcctcagtgagcgagcgagcgcgcagagagggagtggccaactccatcactaggggttcctgcggcctctagactcgaggcgttggcctccgcgccgggttttggcgcctcccgcgggcgcccccctcctcacggcgagcgctgccacgtcagacgaagggcgcagcgagcgtcctgatccttccgcccggacgctcaggacagcggcccgctgctcataagactcggccttagaaccccagtatcagcagaaggacattttaggacgggacttgggtgactctagggcactggttttctttccagagagcggaacaggcgaggaaaagtagtcccttctcggcgattctgcggagggatctccgtggggcggtgaacgccgatgattatataaggacgcgccgggtgtggcacagctagttccgtcgcagccgggatttgggtcgcggttcttgtttgtggatcgctgtgatcgtcacttggtctctggctaactaccggtgtcannnnnnnnnnnnnnnnnnnngccaccatggccccagcggccaaacgggtgaagctggactctagacaagagatcaagagaatcaacaagatcagaaggagactggtcaaggacagcaacacaaagaaggccggcaagacaggccccatgaaaaccctgctcgtcagagtgatgacccctgacctgagagagcggctggaaaacctgagaaagaagcccgagaacatccctcagcctatcagcaacaccagcagggccaacctgaacaagctgctgaccgactacaccgagatgaagaaagccatcctgcacgtgtactgggaagagttccagaaagaccccgtgggcctgatgagcagagttgctcagcctgccagcaagaagatcgaccagaacaagctgaagcccgagatggacgagaagggcaatctgaccacagccggctttgcctgctctcagtgtggccagcctctgttcgtgtacaagctggaacaggtgtccgagaaaggcaaggcctacaccaactacttcggcagatgtaacgtggccgagcacgagaagctgattctgctggcccagctgaaacctgagaaggactctgatgaggccgtgacctacagcctgggcaagtttggacagagagccctggacttctacagcatccacgtgaccaaagaaagcacacaccccgtgaagcccctggctcagatcgccggcaatagatacgcctctggacctgtgggcaaagccctgtccgatgcctgcatgggaacaatcgccagcttcctgagcaagtaccaggacatcatcatcgagcaccagaaggtggtcaagggcaaccagaagagactggaaagcctgagggagctggccggcaaagagaacctggaataccccagcgtgaccctgcctcctcagcctcacacaaaagaaggcgtggacgcctacaacgaagtgatcgccagagtgagaatgtgggtcaacctgaacctgtggcagaagctgaaactgtccagggacgacgccaagcctctgctgagactgaagggcttccctagcttccctctggtggaaagacaggccaatgaagtggattggtgggacatggtctgcaacgtgaagaagctgatcaacgagaagaaagaggatggcaaggttttctggcagaacctggccggctacaagagacaagaagccctgaggccttacctgagcagcgaagaggaccggaagaagggcaagaagttcgccagataccagctgggcgacctgctgctgcacctggaaaagaagcacggcgaggactggggcaaagtgtacgatgaggcctgggagagaatcgacaagaaggtggaaggcctgagcaagcacattaagctggaagaggaaagaaggagcgaggacgcccaatctaaagccgctctgaccgattggctgagagccaaggccagctttgtgatcgagggcctgaaagaggccgacaaggacgagttctgcagatgcgagctgaagctgcagaagtggtacggcgatctgagaggcaagcccttcgccattgaggccgagaacagcatcctggacatcagcggcttcagcaagcagtacaactgcgccttcatttggcagaaagacggcgtcaagaaactgaacctgtacctgatcatcaattacttcaaaggcggcaagctgcggttcaagaagatcaaacccgaggccttcgaggctaacagattctacaccgtgatcaacaaaaagtccggcgagatcgtgcccatggaagtgaacttcaacttcgacgaccccaacctgattatcctgcctctggccttcggcaagagacagggcagagagttcatctggaacgatctgctgagcctggaaaccggctctctgaagctggccaatggcagagtgatcgagaaaaccctgtacaacaggagaaccagacaggacgagcctgctctgtttgtggccctgaccttcgagagaagagaggtgctggacagcagcaacatcaagcccatgaacctgatcggcgtggaccggggcgagaatatccctgctgtgatcgccctgacagaccctgaaggatgcccactgagcagattcaaggactccctgggcaaccctacacacatcctgagaatcggcgagagctacaaagagaagcagaggacaatccaggccaagaaagaggtggaacagcgcagagccggcggatactctaggaagtacgccagcaaggccaagaatctggccgacgacatggtccgaaacaccgccagagatctgctgtactacgccgtgacacaggacgccatgctgatcttcgagaatctgagcagaggcttcggccggcagggcaagagaacctttatggccgagaggcagtacaccagaatggaagattggctcacagctaaactggcctacgagggactgagcaagacctacctgtccaaaacactggcccagtatacctccaagacctgcagcaattgcggcttcaccatcaccagcgccgactacgacagagtgctggaaaagctcaagaaaaccgccaccggctggatgaccaccatcaacggcaaagagctgaaggttgagggccagatcacctactacaacaggtacaagaggcagaacgtcgtgaaggatctgagcgtggaactggacagactgagcgaagagagcgtgaacaacgacatcagcagctggacaaagggcagatcaggcgaggctctgagcctgctgaagaagaggtttagccacagacctgtgcaagagaagttcgtgtgcctgaactgcggcttcgagacacacgccgatgaacaggctgccctgaacattgccagaagctggctgttcctgagaagccaagagtacaagaagtaccagaccaacaagaccaccggcaacaccgacaagagggcctttgtggaaacctggcagagcttctacagaaaaaagctgaaagaagtctggaagcccgccgtgggatccccagccgcgaagcgagtgaaactggactaagaattcctagagcttgtcannnnnnnnnnnnnnnnnnnnagctcgctgatcagcctcgactgtgccttctagttgccagccatctgttgtttgcccctcccccgtgccttccttgaccctggaaggtgccactcccactgtcctttcctaataaaatgaggaaattgcatcgcattgtctgagtaggtgtcattctattctggggggtggggtggggcaggacagcaagggggaggattgggaagagaatagcaggcatgctggggaggtaccgtgagggcctatttcccatgattccttcatatttgcatatacgatacaaggctgttagagagataattggaattaatttgactgtaaacacaaagatattagtacaaaatacgtgacgtagaaagtaataatttcttgggtagtttgcagttttaaaattatgttttaaaatggactatcatatgcttaccgtaacttgaaagtatttcgatttcttggctttatatatcttgtggaaaggacgaaacaccactggcgcttctatctgattactctgagcgccatcaccagcgactatgtcgtagtgggtaaagccgcttacggacttcggtccgtaagaggcatcagagnnnnnnnnnnnnnnnnnnnnttttttttggcggccgcaggaacccctagtgatggagttggccactccctctctgcgcgctcgctcgctcactgaggccgggcgaccaaaggtcgcccgacgcccgggctttgcccgggcggcctcagtgagcgagcgagcgcgcagctgcctgcagg

SEQ ID NO: 4157 - skipped
